United States Patent Application Publication US 2022/0307057 A1 - sequence listing, part 2

SEQ ID NO: 30362 - RNA, 22 nt, Artificial Sequence
  GATA2 Guide RNA
ucccaugugggagacccucuag

SEQ ID NO: 30363 - RNA, 22 nt, Artificial Sequence
  GATA2 Guide RNA
ucuagucccucuuccugcccag

SEQ ID NO: 30364 - RNA, 22 nt, Artificial Sequence
  GATA2 Guide RNA
ugggagacccucuagucccucu

SEQ ID NO: 30365 - RNA, 22 nt, Artificial Sequence
  GATA2 Guide RNA
ugggcaggaagagggacuagag

SEQ ID NO: 30366 - RNA, 22 nt, Artificial Sequence
  GATA2 Guide RNA
ugugggagacccucuagucccu

SEQ ID NO: 30367 - RNA, 20 nt, Artificial Sequence
  GATA2 Guide RNA
aaacgacucuggaccugugc

SEQ ID NO: 30368 - RNA, 20 nt, Artificial Sequence
  GATA2 Guide RNA
aacgacucuggaccugugcc

SEQ ID NO: 30369 - RNA, 20 nt, Artificial Sequence
  GATA2 Guide RNA
acagguccagagucguuuaa

SEQ ID NO: 30370 - RNA, 20 nt, Artificial Sequence
  GATA2 Guide RNA
acaugggagggggcacaggu

SEQ ID NO: 30371 - RNA, 20 nt, Artificial Sequence
  GATA2 Guide RNA
accugugcccccucccaugu

SEQ ID NO: 30372 - RNA, 20 nt, Artificial Sequence
  GATA2 Guide RNA
acgacucuggaccugugccc

SEQ ID NO: 30373 - RNA, 20 nt, Artificial Sequence
  GATA2 Guide RNA
acucuggaccugugcccccu

SEQ ID NO: 30374 - RNA, 20 nt, Artificial Sequence
  GATA2 Guide RNA
agggggcacagguccagagu

SEQ ID NO: 30375 - RNA, 20 nt, Artificial Sequence
  GATA2 Guide RNA
agguccagagucguuuaaag

SEQ ID NO: 30376 - RNA, 20 nt, Artificial Sequence
  GATA2 Guide RNA
augggagggggcacaggucc

SEQ ID NO: 30377 - RNA, 20 nt, Artificial Sequence
  GATA2 Guide RNA
cacagguccagagucguuua

SEQ ID NO: 30378 - RNA, 20 nt, Artificial Sequence
  GATA2 Guide RNA
cacaugggagggggcacagg

SEQ ID NO: 30379 - RNA, 20 nt, Artificial Sequence
  GATA2 Guide RNA
cagguccagagucguuuaaa

SEQ ID NO: 30380 - RNA, 20 nt, Artificial Sequence
  GATA2 Guide RNA
caugggagggggcacagguc

SEQ ID NO: 30381 - RNA, 20 nt, Artificial Sequence
  GATA2 Guide RNA
ccacaugggagggggcacag

SEQ ID NO: 30382 - RNA, 20 nt, Artificial Sequence
  GATA2 Guide RNA
cccacaugggagggggcaca

SEQ ID NO: 30383 - RNA, 20 nt, Artificial Sequence
  GATA2 Guide RNA
ccugugcccccucccaugug

SEQ ID NO: 30384 - RNA, 20 nt, Artificial Sequence
  GATA2 Guide RNA
cgacucuggaccugugcccc

SEQ ID NO: 30385 - RNA, 20 nt, Artificial Sequence
  GATA2 Guide RNA
cucccacaugggagggggca

SEQ ID NO: 30386 - RNA, 20 nt, Artificial Sequence
  GATA2 Guide RNA
cucuggaccugugcccccuc

SEQ ID NO: 30387 - RNA, 20 nt, Artificial Sequence
  GATA2 Guide RNA
cuggaccugugcccccuccc

SEQ ID NO: 30388 - RNA, 20 nt, Artificial Sequence
  GATA2 Guide RNA
cugugcccccucccaugugg

SEQ ID NO: 30389 - RNA, 20 nt, Artificial Sequence
  GATA2 Guide RNA
cuuuaaacgacucuggaccu

SEQ ID NO: 30390 - RNA, 20 nt, Artificial Sequence
  GATA2 Guide RNA
gaccugugcccccucccaug

SEQ ID NO: 30391 - RNA, 20 nt, Artificial Sequence
  GATA2 Guide RNA
gacucuggaccugugccccc

SEQ ID NO: 30392 - RNA, 20 nt, Artificial Sequence
  GATA2 Guide RNA
gagggggcacagguccagag

SEQ ID NO: 30393 - RNA, 20 nt, Artificial Sequence
  GATA2 Guide RNA
gcacagguccagagucguuu

SEQ ID NO: 30394 - RNA, 20 nt, Artificial Sequence
  GATA2 Guide RNA
gcuuuaaacgacucuggacc

SEQ ID NO: 30395 - RNA, 20 nt, Artificial Sequence
  GATA2 Guide RNA
ggaccugugcccccucccau

SEQ ID NO: 30396 - RNA, 20 nt, Artificial Sequence
  GATA2 Guide RNA
ggagggggcacagguccaga

SEQ ID NO: 30397 - RNA, 20 nt, Artificial Sequence
  GATA2 Guide RNA
ggcacagguccagagucguu

SEQ ID NO: 30398 - RNA, 20 nt, Artificial Sequence
  GATA2 Guide RNA
ggcuuuaaacgacucuggac

SEQ ID NO: 30399 - RNA, 20 nt, Artificial Sequence
  GATA2 Guide RNA
gggagggggcacagguccag

SEQ ID NO: 30400 - RNA, 20 nt, Artificial Sequence
  GATA2 Guide RNA
gggcacagguccagagucgu

SEQ ID NO: 30401 - RNA, 20 nt, Artificial Sequence
  GATA2 Guide RNA
ggggcacagguccagagucg

SEQ ID NO: 30402 - RNA, 20 nt, Artificial Sequence
  GATA2 Guide RNA
gggggcacagguccagaguc

SEQ ID NO: 30403 - RNA, 20 nt, Artificial Sequence
  GATA2 Guide RNA
uaaacgacucuggaccugug

SEQ ID NO: 30404 - RNA, 20 nt, Artificial Sequence
  GATA2 Guide RNA
ucccacaugggagggggcac

SEQ ID NO: 30405 - RNA, 20 nt, Artificial Sequence
  GATA2 Guide RNA
ucucccacaugggagggggc

SEQ ID NO: 30406 - RNA, 20 nt, Artificial Sequence
  GATA2 Guide RNA
ucuggaccugugcccccucc

SEQ ID NO: 30407 - RNA, 20 nt, Artificial Sequence
  GATA2 Guide RNA
uggaccugugcccccuccca

SEQ ID NO: 30408 - RNA, 20 nt, Artificial Sequence
  GATA2 Guide RNA
uggcuuuaaacgacucugga

SEQ ID NO: 30409 - RNA, 20 nt, Artificial Sequence
  GATA2 Guide RNA
ugggagggggcacaggucca

SEQ ID NO: 30410 - RNA, 20 nt, Artificial Sequence
  GATA2 Guide RNA
uuaaacgacucuggaccugu

SEQ ID NO: 30411 - RNA, 20 nt, Artificial Sequence
  GATA2 Guide RNA
uuggcuuuaaacgacucugg

SEQ ID NO: 30412 - RNA, 20 nt, Artificial Sequence
  GATA2 Guide RNA
uuuaaacgacucuggaccug

SEQ ID NO: 30413 - RNA, 21 nt, Artificial Sequence
  GATA2 Guide RNA
aaacgacucuggaccugugcc

SEQ ID NO: 30414 - RNA, 21 nt, Artificial Sequence
  GATA2 Guide RNA
aacgacucuggaccugugccc

SEQ ID NO: 30415 - RNA, 21 nt, Artificial Sequence
  GATA2 Guide RNA
acagguccagagucguuuaaa

SEQ ID NO: 30416 - RNA, 21 nt, Artificial Sequence
  GATA2 Guide RNA
acaugggagggggcacagguc

SEQ ID NO: 30417 - RNA, 21 nt, Artificial Sequence
  GATA2 Guide RNA
accugugcccccucccaugug

SEQ ID NO: 30418 - RNA, 21 nt, Artificial Sequence
  GATA2 Guide RNA
acgacucuggaccugugcccc

SEQ ID NO: 30419 - RNA, 21 nt, Artificial Sequence
  GATA2 Guide RNA
acucuggaccugugcccccuc

SEQ ID NO: 30420 - RNA, 21 nt, Artificial Sequence
  GATA2 Guide RNA
agggggcacagguccagaguc

SEQ ID NO: 30421 - RNA, 21 nt, Artificial Sequence
  GATA2 Guide RNA
agguccagagucguuuaaagc

SEQ ID NO: 30422 - RNA, 21 nt, Artificial Sequence
  GATA2 Guide RNA
augggagggggcacaggucca

SEQ ID NO: 30423 - RNA, 21 nt, Artificial Sequence
  GATA2 Guide RNA
cacagguccagagucguuuaa

SEQ ID NO: 30424 - RNA, 21 nt, Artificial Sequence
  GATA2 Guide RNA
cacaugggagggggcacaggu

SEQ ID NO: 30425 - RNA, 21 nt, Artificial Sequence
  GATA2 Guide RNA
cagguccagagucguuuaaag

SEQ ID NO: 30426 - RNA, 21 nt, Artificial Sequence
  GATA2 Guide RNA
caugggagggggcacaggucc

SEQ ID NO: 30427 - RNA, 21 nt, Artificial Sequence
  GATA2 Guide RNA
ccacaugggagggggcacagg

SEQ ID NO: 30428 - RNA, 21 nt, Artificial Sequence
  GATA2 Guide RNA
cccacaugggagggggcacag

SEQ ID NO: 30429 - RNA, 21 nt, Artificial Sequence
  GATA2 Guide RNA
ccugugcccccucccaugugg

SEQ ID NO: 30430 - RNA, 21 nt, Artificial Sequence
  GATA2 Guide RNA
cgacucuggaccugugccccc

SEQ ID NO: 30431 - RNA, 21 nt, Artificial Sequence
  GATA2 Guide RNA
cucccacaugggagggggcac

SEQ ID NO: 30432 - RNA, 21 nt, Artificial Sequence
  GATA2 Guide RNA
cucuggaccugugcccccucc

SEQ ID NO: 30433 - RNA, 21 nt, Artificial Sequence
  GATA2 Guide RNA
cuggaccugugcccccuccca

SEQ ID NO: 30434 - RNA, 21 nt, Artificial Sequence
  GATA2 Guide RNA
cugugcccccucccauguggg

SEQ ID NO: 30435 - RNA, 21 nt, Artificial Sequence
  GATA2 Guide RNA
cuuuaaacgacucuggaccug

SEQ ID NO: 30436 - RNA, 21 nt, Artificial Sequence
  GATA2 Guide RNA
gaccugugcccccucccaugu

SEQ ID NO: 30437 - RNA, 21 nt, Artificial Sequence
  GATA2 Guide RNA
gacucuggaccugugcccccu

SEQ ID NO: 30438 - RNA, 21 nt, Artificial Sequence
  GATA2 Guide RNA
gagggggcacagguccagagu

SEQ ID NO: 30439 - RNA, 21 nt, Artificial Sequence
  GATA2 Guide RNA
gcacagguccagagucguuua

SEQ ID NO: 30440 - RNA, 21 nt, Artificial Sequence
  GATA2 Guide RNA
gcuuuaaacgacucuggaccu

SEQ ID NO: 30441 - RNA, 21 nt, Artificial Sequence
  GATA2 Guide RNA
ggaccugugcccccucccaug

SEQ ID NO: 30442 - RNA, 21 nt, Artificial Sequence
  GATA2 Guide RNA
ggagggggcacagguccagag

SEQ ID NO: 30443 - RNA, 21 nt, Artificial Sequence
  GATA2 Guide RNA
ggcacagguccagagucguuu

SEQ ID NO: 30444 - RNA, 21 nt, Artificial Sequence
  GATA2 Guide RNA
ggcuuuaaacgacucuggacc

SEQ ID NO: 30445 - RNA, 21 nt, Artificial Sequence
  GATA2 Guide RNA
gggagggggcacagguccaga

SEQ ID NO: 30446 - RNA, 21 nt, Artificial Sequence
  GATA2 Guide RNA
gggcacagguccagagucguu

SEQ ID NO: 30447 - RNA, 21 nt, Artificial Sequence
  GATA2 Guide RNA
ggggcacagguccagagucgu

SEQ ID NO: 30448 - RNA, 21 nt, Artificial Sequence
  GATA2 Guide RNA
gggggcacagguccagagucg

SEQ ID NO: 30449 - RNA, 21 nt, Artificial Sequence
  GATA2 Guide RNA
gucucccacaugggagggggc

SEQ ID NO: 30450 - RNA, 21 nt, Artificial Sequence
  GATA2 Guide RNA
uaaacgacucuggaccugugc

SEQ ID NO: 30451 - RNA, 21 nt, Artificial Sequence
  GATA2 Guide RNA
ucccacaugggagggggcaca

SEQ ID NO: 30452 - RNA, 21 nt, Artificial Sequence
  GATA2 Guide RNA
ucucccacaugggagggggca

SEQ ID NO: 30453 - RNA, 21 nt, Artificial Sequence
  GATA2 Guide RNA
ucuggaccugugcccccuccc

SEQ ID NO: 30454 - RNA, 21 nt, Artificial Sequence
  GATA2 Guide RNA
uggaccugugcccccucccau

SEQ ID NO: 30455 - RNA, 21 nt, Artificial Sequence
  GATA2 Guide RNA
uggcuuuaaacgacucuggac

SEQ ID NO: 30456 - RNA, 21 nt, Artificial Sequence
  GATA2 Guide RNA
ugggagggggcacagguccag

SEQ ID NO: 30457 - RNA, 21 nt, Artificial Sequence
  GATA2 Guide RNA
uuaaacgacucuggaccugug

SEQ ID NO: 30458 - RNA, 21 nt, Artificial Sequence
  GATA2 Guide RNA
uuggcuuuaaacgacucugga

SEQ ID NO: 30459 - RNA, 21 nt, Artificial Sequence
  GATA2 Guide RNA
uuuaaacgacucuggaccugu

SEQ ID NO: 30460 - RNA, 21 nt, Artificial Sequence
  GATA2 Guide RNA
uuuggcuuuaaacgacucugg

SEQ ID NO: 30461 - RNA, 22 nt, Artificial Sequence
  GATA2 Guide RNA
aaacgacucuggaccugugccc

SEQ ID NO: 30462 - RNA, 22 nt, Artificial Sequence
  GATA2 Guide RNA
aacgacucuggaccugugcccc

SEQ ID NO: 30463 - RNA, 22 nt, Artificial Sequence
  GATA2 Guide RNA
acagguccagagucguuuaaag

SEQ ID NO: 30464 - RNA, 22 nt, Artificial Sequence
  GATA2 Guide RNA
acaugggagggggcacaggucc

SEQ ID NO: 30465 - RNA, 22 nt, Artificial Sequence
  GATA2 Guide RNA
accugugcccccucccaugugg

SEQ ID NO: 30466 - RNA, 22 nt, Artificial Sequence
  GATA2 Guide RNA
acgacucuggaccugugccccc

SEQ ID NO: 30467 - RNA, 22 nt, Artificial Sequence
  GATA2 Guide RNA
acucuggaccugugcccccucc

SEQ ID NO: 30468 - RNA, 22 nt, Artificial Sequence
  GATA2 Guide RNA
agggggcacagguccagagucg

SEQ ID NO: 30469 - RNA, 22 nt, Artificial Sequence
  GATA2 Guide RNA
agguccagagucguuuaaagcc

SEQ ID NO: 30470 - RNA, 22 nt, Artificial Sequence
  GATA2 Guide RNA
augggagggggcacagguccag

SEQ ID NO: 30471 - RNA, 22 nt, Artificial Sequence
  GATA2 Guide RNA
auuuggcuuuaaacgacucugg

SEQ ID NO: 30472 - RNA, 22 nt, Artificial Sequence
  GATA2 Guide RNA
cacagguccagagucguuuaaa

SEQ ID NO: 30473 - RNA, 22 nt, Artificial Sequence
  GATA2 Guide RNA
cacaugggagggggcacagguc

SEQ ID NO: 30474 - RNA, 22 nt, Artificial Sequence
  GATA2 Guide RNA
cagguccagagucguuuaaagc

SEQ ID NO: 30475 - RNA, 22 nt, Artificial Sequence
  GATA2 Guide RNA
caugggagggggcacaggucca

SEQ ID NO: 30476 - RNA, 22 nt, Artificial Sequence
  GATA2 Guide RNA
ccacaugggagggggcacaggu

SEQ ID NO: 30477 - RNA, 22 nt, Artificial Sequence
  GATA2 Guide RNA
cccacaugggagggggcacagg

SEQ ID NO: 30478 - RNA, 22 nt, Artificial Sequence
  GATA2 Guide RNA
ccugugcccccucccauguggg

SEQ ID NO: 30479 - RNA, 22 nt, Artificial Sequence
  GATA2 Guide RNA
cgacucuggaccugugcccccu

SEQ ID NO: 30480 - RNA, 22 nt, Artificial Sequence
  GATA2 Guide RNA
cucccacaugggagggggcaca

SEQ ID NO: 30481 - RNA, 22 nt, Artificial Sequence
  GATA2 Guide RNA
cucuggaccugugcccccuccc

SEQ ID NO: 30482 - RNA, 22 nt, Artificial Sequence
  GATA2 Guide RNA
cuggaccugugcccccucccau

SEQ ID NO: 30483 - RNA, 22 nt, Artificial Sequence
  GATA2 Guide RNA
cugugcccccucccauguggga

SEQ ID NO: 30484 - RNA, 22 nt, Artificial Sequence
  GATA2 Guide RNA
cuuuaaacgacucuggaccugu

SEQ ID NO: 30485 - RNA, 22 nt, Artificial Sequence
  GATA2 Guide RNA
gaccugugcccccucccaugug

SEQ ID NO: 30486 - RNA, 22 nt, Artificial Sequence
  GATA2 Guide RNA
gacucuggaccugugcccccuc

SEQ ID NO: 30487 - RNA, 22 nt, Artificial Sequence
  GATA2 Guide RNA
gagggggcacagguccagaguc

SEQ ID NO: 30488 - RNA, 22 nt, Artificial Sequence
  GATA2 Guide RNA
gcacagguccagagucguuuaa

SEQ ID NO: 30489 - RNA, 22 nt, Artificial Sequence
  GATA2 Guide RNA
gcuuuaaacgacucuggaccug

SEQ ID NO: 30490 - RNA, 22 nt, Artificial Sequence
  GATA2 Guide RNA
ggaccugugcccccucccaugu

SEQ ID NO: 30491 - RNA, 22 nt, Artificial Sequence
  GATA2 Guide RNA
ggagggggcacagguccagagu

SEQ ID NO: 30492 - RNA, 22 nt, Artificial Sequence
  GATA2 Guide RNA
ggcacagguccagagucguuua

SEQ ID NO: 30493 - RNA, 22 nt, Artificial Sequence
  GATA2 Guide RNA
ggcuuuaaacgacucuggaccu

SEQ ID NO: 30494 - RNA, 22 nt, Artificial Sequence
  GATA2 Guide RNA
gggagggggcacagguccagag

SEQ ID NO: 30495 - RNA, 22 nt, Artificial Sequence
  GATA2 Guide RNA
gggcacagguccagagucguuu

SEQ ID NO: 30496 - RNA, 22 nt, Artificial Sequence
  GATA2 Guide RNA
ggggcacagguccagagucguu

SEQ ID NO: 30497 - RNA, 22 nt, Artificial Sequence
  GATA2 Guide RNA
gggggcacagguccagagucgu

SEQ ID NO: 30498 - RNA, 22 nt, Artificial Sequence
  GATA2 Guide RNA
ggucucccacaugggagggggc

SEQ ID NO: 30499 - RNA, 22 nt, Artificial Sequence
  GATA2 Guide RNA
gucucccacaugggagggggca

SEQ ID NO: 30500 - RNA, 22 nt, Artificial Sequence
  GATA2 Guide RNA
uaaacgacucuggaccugugcc

SEQ ID NO: 30501 - RNA, 22 nt, Artificial Sequence
  GATA2 Guide RNA
ucccacaugggagggggcacag

SEQ ID NO: 30502 - RNA, 22 nt, Artificial Sequence
  GATA2 Guide RNA
ucucccacaugggagggggcac

SEQ ID NO: 30503 - RNA, 22 nt, Artificial Sequence
  GATA2 Guide RNA
ucuggaccugugcccccuccca

SEQ ID NO: 30504 - RNA, 22 nt, Artificial Sequence
  GATA2 Guide RNA
uggaccugugcccccucccaug

SEQ ID NO: 30505 - RNA, 22 nt, Artificial Sequence
  GATA2 Guide RNA
uggcuuuaaacgacucuggacc

SEQ ID NO: 30506 - RNA, 22 nt, Artificial Sequence
  GATA2 Guide RNA
ugggagggggcacagguccaga

SEQ ID NO: 30507 - RNA, 22 nt, Artificial Sequence
  GATA2 Guide RNA
uuaaacgacucuggaccugugc

SEQ ID NO: 30508 - RNA, 22 nt, Artificial Sequence
  GATA2 Guide RNA
uuggcuuuaaacgacucuggac

SEQ ID NO: 30509 - RNA, 22 nt, Artificial Sequence
  GATA2 Guide RNA
uuuaaacgacucuggaccugug

SEQ ID NO: 30510 - RNA, 22 nt, Artificial Sequence
  GATA2 Guide RNA
uuuggcuuuaaacgacucugga

SEQ ID NO: 30511 - RNA, 20 nt, Artificial Sequence
  GATA2 Guide RNA
aaacgacucuggacccgugc

SEQ ID NO: 30512 - RNA, 20 nt, Artificial Sequence
  GATA2 Guide RNA
aacgacucuggacccgugcc

SEQ ID NO: 30513 - RNA, 20 nt, Artificial Sequence
  GATA2 Guide RNA
acaugggagggggcacgggu

SEQ ID NO: 30514 - RNA, 20 nt, Artificial Sequence
  GATA2 Guide RNA
acccgugcccccucccaugu

SEQ ID NO: 30515 - RNA, 20 nt, Artificial Sequence
  GATA2 Guide RNA
acgacucuggacccgugccc

SEQ ID NO: 30516 - RNA, 20 nt, Artificial Sequence
  GATA2 Guide RNA
acggguccagagucguuuaa

SEQ ID NO: 30517 - RNA, 20 nt, Artificial Sequence
  GATA2 Guide RNA
acucuggacccgugcccccu

SEQ ID NO: 30518 - RNA, 20 nt, Artificial Sequence
  GATA2 Guide RNA
agggggcacggguccagagu

SEQ ID NO: 30519 - RNA, 20 nt, Artificial Sequence
  GATA2 Guide RNA
augggagggggcacgggucc

SEQ ID NO: 30520 - RNA, 20 nt, Artificial Sequence
  GATA2 Guide RNA
cacaugggagggggcacggg

SEQ ID NO: 30521 - RNA, 20 nt, Artificial Sequence
  GATA2 Guide RNA
cacggguccagagucguuua

SEQ ID NO: 30522 - RNA, 20 nt, Artificial Sequence
  GATA2 Guide RNA
caugggagggggcacggguc

SEQ ID NO: 30523 - RNA, 20 nt, Artificial Sequence
  GATA2 Guide RNA
ccacaugggagggggcacgg

SEQ ID NO: 30524 - RNA, 20 nt, Artificial Sequence
  GATA2 Guide RNA
cccacaugggagggggcacg

SEQ ID NO: 30525 - RNA, 20 nt, Artificial Sequence
  GATA2 Guide RNA
cccgugcccccucccaugug

SEQ ID NO: 30526 - RNA, 20 nt, Artificial Sequence
  GATA2 Guide RNA
ccgugcccccucccaugugg

SEQ ID NO: 30527 - RNA, 20 nt, Artificial Sequence
  GATA2 Guide RNA
cgacucuggacccgugcccc

SEQ ID NO: 30528 - RNA, 20 nt, Artificial Sequence
  GATA2 Guide RNA
cggguccagagucguuuaaa

SEQ ID NO: 30529 - RNA, 20 nt, Artificial Sequence
  GATA2 Guide RNA
cucuggacccgugcccccuc

SEQ ID NO: 30530 - RNA, 20 nt, Artificial Sequence
  GATA2 Guide RNA
cuggacccgugcccccuccc

SEQ ID NO: 30531 - RNA, 20 nt, Artificial Sequence
  GATA2 Guide RNA
cuuuaaacgacucuggaccc

SEQ ID NO: 30532 - RNA, 20 nt, Artificial Sequence
  GATA2 Guide RNA
gacccgugcccccucccaug

SEQ ID NO: 30533 - RNA, 20 nt, Artificial Sequence
  GATA2 Guide RNA
gacucuggacccgugccccc

SEQ ID NO: 30534 - RNA, 20 nt, Artificial Sequence
  GATA2 Guide RNA
gagggggcacggguccagag

SEQ ID NO: 30535 - RNA, 20 nt, Artificial Sequence
  GATA2 Guide RNA
gcacggguccagagucguuu

SEQ ID NO: 30536 - RNA, 20 nt, Artificial Sequence
  GATA2 Guide RNA
ggacccgugcccccucccau

SEQ ID NO: 30537 - RNA, 20 nt, Artificial Sequence
  GATA2 Guide RNA
ggagggggcacggguccaga

SEQ ID NO: 30538 - RNA, 20 nt, Artificial Sequence
  GATA2 Guide RNA
ggcacggguccagagucguu

SEQ ID NO: 30539 - RNA, 20 nt, Artificial Sequence
  GATA2 Guide RNA
gggagggggcacggguccag

SEQ ID NO: 30540 - RNA, 20 nt, Artificial Sequence
  GATA2 Guide RNA
gggcacggguccagagucgu

SEQ ID NO: 30541 - RNA, 20 nt, Artificial Sequence
  GATA2 Guide RNA
ggggcacggguccagagucg

SEQ ID NO: 30542 - RNA, 20 nt, Artificial Sequence
  GATA2 Guide RNA
gggggcacggguccagaguc

SEQ ID NO: 30543 - RNA, 20 nt, Artificial Sequence
  GATA2 Guide RNA
ggguccagagucguuuaaag

SEQ ID NO: 30544 - RNA, 20 nt, Artificial Sequence
  GATA2 Guide RNA
uaaacgacucuggacccgug

SEQ ID NO: 30545 - RNA, 20 nt, Artificial Sequence
  GATA2 Guide RNA
ucuggacccgugcccccucc

SEQ ID NO: 30546 - RNA, 20 nt, Artificial Sequence
  GATA2 Guide RNA
uggacccgugcccccuccca

SEQ ID NO: 30547 - RNA, 20 nt, Artificial Sequence
  GATA2 Guide RNA
ugggagggggcacgggucca

SEQ ID NO: 30548 - RNA, 20 nt, Artificial Sequence
  GATA2 Guide RNA
uuaaacgacucuggacccgu

SEQ ID NO: 30549 - RNA, 20 nt, Artificial Sequence
  GATA2 Guide RNA
uuuaaacgacucuggacccg

SEQ ID NO: 30550 - RNA, 21 nt, Artificial Sequence
  GATA2 Guide RNA
aaacgacucuggacccgugcc

SEQ ID NO: 30551 - RNA, 21 nt, Artificial Sequence
  GATA2 Guide RNA
aacgacucuggacccgugccc

SEQ ID NO: 30552 - RNA, 21 nt, Artificial Sequence
  GATA2 Guide RNA
acaugggagggggcacggguc

SEQ ID NO: 30553 - RNA, 21 nt, Artificial Sequence
  GATA2 Guide RNA
acccgugcccccucccaugug

SEQ ID NO: 30554 - RNA, 21 nt, Artificial Sequence
  GATA2 Guide RNA
acgacucuggacccgugcccc

SEQ ID NO: 30555 - RNA, 21 nt, Artificial Sequence
  GATA2 Guide RNA
acggguccagagucguuuaaa

SEQ ID NO: 30556 - RNA, 21 nt, Artificial Sequence
  GATA2 Guide RNA
acucuggacccgugcccccuc

SEQ ID NO: 30557 - RNA, 21 nt, Artificial Sequence
  GATA2 Guide RNA
agggggcacggguccagaguc

SEQ ID NO: 30558 - RNA, 21 nt, Artificial Sequence
  GATA2 Guide RNA
augggagggggcacgggucca

SEQ ID NO: 30559 - RNA, 21 nt, Artificial Sequence
  GATA2 Guide RNA
cacaugggagggggcacgggu

SEQ ID NO: 30560 - RNA, 21 nt, Artificial Sequence
  GATA2 Guide RNA
cacggguccagagucguuuaa

SEQ ID NO: 30561 - RNA, 21 nt, Artificial Sequence
  GATA2 Guide RNA
caugggagggggcacgggucc

SEQ ID NO: 30562 - RNA, 21 nt, Artificial Sequence
  GATA2 Guide RNA
ccacaugggagggggcacggg

SEQ ID NO: 30563 - RNA, 21 nt, Artificial Sequence
  GATA2 Guide RNA
cccacaugggagggggcacgg

SEQ ID NO: 30564 - RNA, 21 nt, Artificial Sequence
  GATA2 Guide RNA
cccgugcccccucccaugugg

SEQ ID NO: 30565 - RNA, 21 nt, Artificial Sequence
  GATA2 Guide RNA
ccgugcccccucccauguggg

SEQ ID NO: 30566 - RNA, 21 nt, Artificial Sequence
  GATA2 Guide RNA
cgacucuggacccgugccccc

SEQ ID NO: 30567 - RNA, 21 nt, Artificial Sequence
  GATA2 Guide RNA
cggguccagagucguuuaaag

SEQ ID NO: 30568 - RNA, 21 nt, Artificial Sequence
  GATA2 Guide RNA
cucuggacccgugcccccucc

SEQ ID NO: 30569 - RNA, 21 nt, Artificial Sequence
  GATA2 Guide RNA
cuggacccgugcccccuccca

SEQ ID NO: 30570 - RNA, 21 nt, Artificial Sequence
  GATA2 Guide RNA
cuuuaaacgacucuggacccg

SEQ ID NO: 30571 - RNA, 21 nt, Artificial Sequence
  GATA2 Guide RNA
gacccgugcccccucccaugu

SEQ ID NO: 30572 - RNA, 21 nt, Artificial Sequence
  GATA2 Guide RNA
gacucuggacccgugcccccu

SEQ ID NO: 30573 - RNA, 21 nt, Artificial Sequence
  GATA2 Guide RNA
gagggggcacggguccagagu

SEQ ID NO: 30574 - RNA, 21 nt, Artificial Sequence
  GATA2 Guide RNA
gcacggguccagagucguuua

SEQ ID NO: 30575 - RNA, 21 nt, Artificial Sequence
  GATA2 Guide RNA
gcuuuaaacgacucuggaccc

SEQ ID NO: 30576 - RNA, 21 nt, Artificial Sequence
  GATA2 Guide RNA
ggacccgugcccccucccaug

SEQ ID NO: 30577 - RNA, 21 nt, Artificial Sequence
  GATA2 Guide RNA
ggagggggcacggguccagag

SEQ ID NO: 30578 - RNA, 21 nt, Artificial Sequence
  GATA2 Guide RNA
ggcacggguccagagucguuu

SEQ ID NO: 30579 - RNA, 21 nt, Artificial Sequence
  GATA2 Guide RNA
gggagggggcacggguccaga

SEQ ID NO: 30580 - RNA, 21 nt, Artificial Sequence
  GATA2 Guide RNA
gggcacggguccagagucguu

SEQ ID NO: 30581 - RNA, 21 nt, Artificial Sequence
  GATA2 Guide RNA
ggggcacggguccagagucgu

SEQ ID NO: 30582 - RNA, 21 nt, Artificial Sequence
  GATA2 Guide RNA
gggggcacggguccagagucg

SEQ ID NO: 30583 - RNA, 21 nt, Artificial Sequence
  GATA2 Guide RNA
ggguccagagucguuuaaagc

SEQ ID NO: 30584 - RNA, 21 nt, Artificial Sequence
  GATA2 Guide RNA
uaaacgacucuggacccgugc

SEQ ID NO: 30585 - RNA, 21 nt, Artificial Sequence
  GATA2 Guide RNA
ucccacaugggagggggcacg

SEQ ID NO: 30586 - RNA, 21 nt, Artificial Sequence
  GATA2 Guide RNA
ucuggacccgugcccccuccc

SEQ ID NO: 30587 - RNA, 21 nt, Artificial Sequence
  GATA2 Guide RNA
uggacccgugcccccucccau

SEQ ID NO: 30588 - RNA, 21 nt, Artificial Sequence
  GATA2 Guide RNA
ugggagggggcacggguccag

SEQ ID NO: 30589 - RNA, 21 nt, Artificial Sequence
  GATA2 Guide RNA
uuaaacgacucuggacccgug

SEQ ID NO: 30590 - RNA, 21 nt, Artificial Sequence
  GATA2 Guide RNA
uuuaaacgacucuggacccgu

SEQ ID NO: 30591 - RNA, 22 nt, Artificial Sequence
  GATA2 Guide RNA
aaacgacucuggacccgugccc

SEQ ID NO: 30592 - RNA, 22 nt, Artificial Sequence
  GATA2 Guide RNA
aacgacucuggacccgugcccc

SEQ ID NO: 30593 - RNA, 22 nt, Artificial Sequence
  GATA2 Guide RNA
acaugggagggggcacgggucc

SEQ ID NO: 30594 - RNA, 22 nt, Artificial Sequence
  GATA2 Guide RNA
acccgugcccccucccaugugg

SEQ ID NO: 30595 - RNA, 22 nt, Artificial Sequence
  GATA2 Guide RNA
acgacucuggacccgugccccc

SEQ ID NO: 30596 - RNA, 22 nt, Artificial Sequence
  GATA2 Guide RNA
acggguccagagucguuuaaag

SEQ ID NO: 30597 - RNA, 22 nt, Artificial Sequence
  GATA2 Guide RNA
acucuggacccgugcccccucc

SEQ ID NO: 30598 - RNA, 22 nt, Artificial Sequence
  GATA2 Guide RNA
agggggcacggguccagagucg

SEQ ID NO: 30599 - RNA, 22 nt, Artificial Sequence
  GATA2 Guide RNA
augggagggggcacggguccag

SEQ ID NO: 30600 - RNA, 22 nt, Artificial Sequence
  GATA2 Guide RNA
cacaugggagggggcacggguc

SEQ ID NO: 30601 - RNA, 22 nt, Artificial Sequence
  GATA2 Guide RNA
cacggguccagagucguuuaaa

SEQ ID NO: 30602 - RNA, 22 nt, Artificial Sequence
  GATA2 Guide RNA
caugggagggggcacgggucca

SEQ ID NO: 30603 - RNA, 22 nt, Artificial Sequence
  GATA2 Guide RNA
ccacaugggagggggcacgggu

SEQ ID NO: 30604 - RNA, 22 nt, Artificial Sequence
  GATA2 Guide RNA
cccacaugggagggggcacggg

SEQ ID NO: 30605 - RNA, 22 nt, Artificial Sequence
  GATA2 Guide RNA
cccgugcccccucccauguggg

SEQ ID NO: 30606 - RNA, 22 nt, Artificial Sequence
  GATA2 Guide RNA
ccgugcccccucccauguggga

SEQ ID NO: 30607 - RNA, 22 nt, Artificial Sequence
  GATA2 Guide RNA
cgacucuggacccgugcccccu

SEQ ID NO: 30608 - RNA, 22 nt, Artificial Sequence
  GATA2 Guide RNA
cggguccagagucguuuaaagc

SEQ ID NO: 30609 - RNA, 22 nt, Artificial Sequence
  GATA2 Guide RNA
cucccacaugggagggggcacg

SEQ ID NO: 30610 - RNA, 22 nt, Artificial Sequence
  GATA2 Guide RNA
cucuggacccgugcccccuccc

SEQ ID NO: 30611 - RNA, 22 nt, Artificial Sequence
  GATA2 Guide RNA
cuggacccgugcccccucccau

SEQ ID NO: 30612 - RNA, 22 nt, Artificial Sequence
  GATA2 Guide RNA
cuuuaaacgacucuggacccgu

SEQ ID NO: 30613 - RNA, 22 nt, Artificial Sequence
  GATA2 Guide RNA
gacccgugcccccucccaugug

SEQ ID NO: 30614 - RNA, 22 nt, Artificial Sequence
  GATA2 Guide RNA
gacucuggacccgugcccccuc

SEQ ID NO: 30615 - RNA, 22 nt, Artificial Sequence
  GATA2 Guide RNA
gagggggcacggguccagaguc

SEQ ID NO: 30616 - RNA, 22 nt, Artificial Sequence
  GATA2 Guide RNA
gcacggguccagagucguuuaa

SEQ ID NO: 30617 - RNA, 22 nt, Artificial Sequence
  GATA2 Guide RNA
gcuuuaaacgacucuggacccg

SEQ ID NO: 30618 - RNA, 22 nt, Artificial Sequence
  GATA2 Guide RNA
ggacccgugcccccucccaugu

SEQ ID NO: 30619 - RNA, 22 nt, Artificial Sequence
  GATA2 Guide RNA
ggagggggcacggguccagagu

SEQ ID NO: 30620 - RNA, 22 nt, Artificial Sequence
  GATA2 Guide RNA
ggcacggguccagagucguuua

SEQ ID NO: 30621 - RNA, 22 nt, Artificial Sequence
  GATA2 Guide RNA
ggcuuuaaacgacucuggaccc

SEQ ID NO: 30622 - RNA, 22 nt, Artificial Sequence
  GATA2 Guide RNA
gggagggggcacggguccagag

SEQ ID NO: 30623 - RNA, 22 nt, Artificial Sequence
  GATA2 Guide RNA
gggcacggguccagagucguuu

SEQ ID NO: 30624 - RNA, 22 nt, Artificial Sequence
  GATA2 Guide RNA
ggggcacggguccagagucguu

SEQ ID NO: 30625 - RNA, 22 nt, Artificial Sequence
  GATA2 Guide RNA
gggggcacggguccagagucgu

SEQ ID NO: 30626 - RNA, 22 nt, Artificial Sequence
  GATA2 Guide RNA
ggguccagagucguuuaaagcc

SEQ ID NO: 30627 - RNA, 22 nt, Artificial Sequence
  GATA2 Guide RNA
uaaacgacucuggacccgugcc

SEQ ID NO: 30628 - RNA, 22 nt, Artificial Sequence
  GATA2 Guide RNA
ucccacaugggagggggcacgg

SEQ ID NO: 30629 - RNA, 22 nt, Artificial Sequence
  GATA2 Guide RNA
ucuggacccgugcccccuccca

SEQ ID NO: 30630 - RNA, 22 nt, Artificial Sequence
  GATA2 Guide RNA
uggacccgugcccccucccaug

SEQ ID NO: 30631 - RNA, 22 nt, Artificial Sequence
  GATA2 Guide RNA
ugggagggggcacggguccaga

SEQ ID NO: 30632 - RNA, 22 nt, Artificial Sequence
  GATA2 Guide RNA
uuaaacgacucuggacccgugc

SEQ ID NO: 30633 - RNA, 22 nt, Artificial Sequence
  GATA2 Guide RNA
uuuaaacgacucuggacccgug

SEQ ID NO: 30634 - RNA, 20 nt, Artificial Sequence
  GATA2 Guide RNA
aaaaggugggagccagagug

SEQ ID NO: 30635 - RNA, 20 nt, Artificial Sequence
  GATA2 Guide RNA
aaaggugggagccagagugg

SEQ ID NO: 30636 - RNA, 20 nt, Artificial Sequence
  GATA2 Guide RNA
aaggugggagccagaguggg

SEQ ID NO: 30637 - RNA, 20 nt, Artificial Sequence
  GATA2 Guide RNA
acagcagcccacucuggcuc

SEQ ID NO: 30638 - RNA, 20 nt, Artificial Sequence
  GATA2 Guide RNA
accccuacagcagcccacuc

SEQ ID NO: 30639 - RNA, 20 nt, Artificial Sequence
  GATA2 Guide RNA
agagugggcugcuguagggg

SEQ ID NO: 30640 - RNA, 20 nt, Artificial Sequence
  GATA2 Guide RNA
agcagcccacucuggcuccc

SEQ ID NO: 30641 - RNA, 20 nt, Artificial Sequence
  GATA2 Guide RNA
agcccacucuggcucccacc

SEQ ID NO: 30642 - RNA, 20 nt, Artificial Sequence
  GATA2 Guide RNA
aggugggagccagagugggc

SEQ ID NO: 30643 - RNA, 20 nt, Artificial Sequence
  GATA2 Guide RNA
agugggcugcuguaggggug

SEQ ID NO: 30644 - RNA, 20 nt, Artificial Sequence
  GATA2 Guide RNA
caccccuacagcagcccacu

SEQ ID NO: 30645 - RNA, 20 nt, Artificial Sequence
  GATA2 Guide RNA
cagagugggcugcuguaggg

SEQ ID NO: 30646 - RNA, 20 nt, Artificial Sequence
  GATA2 Guide RNA
cagcagcccacucuggcucc

SEQ ID NO: 30647 - RNA, 20 nt, Artificial Sequence
  GATA2 Guide RNA
cagcccacucuggcucccac

SEQ ID NO: 30648 - RNA, 20 nt, Artificial Sequence
  GATA2 Guide RNA
ccagagugggcugcuguagg

SEQ ID NO: 30649 - RNA, 20 nt, Artificial Sequence
  GATA2 Guide RNA
ccccuacagcagcccacucu

SEQ ID NO: 30650 - RNA, 20 nt, Artificial Sequence
  GATA2 Guide RNA
cccuacagcagcccacucug

SEQ ID NO: 30651 - RNA, 20 nt, Artificial Sequence
  GATA2 Guide RNA
ccuacagcagcccacucugg

SEQ ID NO: 30652 - RNA, 20 nt, Artificial Sequence
  GATA2 Guide RNA
ccucccucaccccuacagca

SEQ ID NO: 30653 - RNA, 20 nt, Artificial Sequence
  GATA2 Guide RNA
cuacagcagcccacucuggc

SEQ ID NO: 30654 - RNA, 20 nt, Artificial Sequence
  GATA2 Guide RNA
gagugggcugcuguaggggu

SEQ ID NO: 30655 - RNA, 20 nt, Artificial Sequence
  GATA2 Guide RNA
gcagcccacucuggcuccca

SEQ ID NO: 30656 - RNA, 20 nt, Artificial Sequence
  GATA2 Guide RNA
gccucccucaccccuacagc

SEQ ID NO: 30657 - RNA, 20 nt, Artificial Sequence
  GATA2 Guide RNA
ggagccagagugggcugcug

SEQ ID NO: 30658 - RNA, 20 nt, Artificial Sequence
  GATA2 Guide RNA
ggccucccucaccccuacag

SEQ ID NO: 30659 - RNA, 20 nt, Artificial Sequence
  GATA2 Guide RNA
ggcugcuguaggggugaggg

SEQ ID NO: 30660 - RNA, 20 nt, Artificial Sequence
  GATA2 Guide RNA
gggagccagagugggcugcu

SEQ ID NO: 30661 - RNA, 20 nt, Artificial Sequence
  GATA2 Guide RNA
gggcugcuguaggggugagg

SEQ ID NO: 30662 - RNA, 20 nt, Artificial Sequence
  GATA2 Guide RNA
ggugggagccagagugggcu

SEQ ID NO: 30663 - RNA, 20 nt, Artificial Sequence
  GATA2 Guide RNA
gugggagccagagugggcug

SEQ ID NO: 30664 - RNA, 20 nt, Artificial Sequence
  GATA2 Guide RNA
gugggcugcuguagggguga

SEQ ID NO: 30665 - RNA, 20 nt, Artificial Sequence
  GATA2 Guide RNA
uacagcagcccacucuggcu

SEQ ID NO: 30666 - RNA, 20 nt, Artificial Sequence
  GATA2 Guide RNA
ucaccccuacagcagcccac

SEQ ID NO: 30667 - RNA, 20 nt, Artificial Sequence
  GATA2 Guide RNA
uggccucccucaccccuaca

SEQ ID NO: 30668 - RNA, 20 nt, Artificial Sequence
  GATA2 Guide RNA
ugggagccagagugggcugc

SEQ ID NO: 30669 - RNA, 20 nt, Artificial Sequence
  GATA2 Guide RNA
ugggcugcuguaggggugag

SEQ ID NO: 30670 - RNA, 21 nt, Artificial Sequence
  GATA2 Guide RNA
aaaaggugggagccagagugg

SEQ ID NO: 30671 - RNA, 21 nt, Artificial Sequence
  GATA2 Guide RNA
aaaggugggagccagaguggg

SEQ ID NO: 30672 - RNA, 21 nt, Artificial Sequence
  GATA2 Guide RNA
aaggugggagccagagugggc

SEQ ID NO: 30673 - RNA, 21 nt, Artificial Sequence
  GATA2 Guide RNA
acagcagcccacucuggcucc

SEQ ID NO: 30674 - RNA, 21 nt, Artificial Sequence
  GATA2 Guide RNA
accccuacagcagcccacucu

SEQ ID NO: 30675 - RNA, 21 nt, Artificial Sequence
  GATA2 Guide RNA
agagugggcugcuguaggggu

SEQ ID NO: 30676 - RNA, 21 nt, Artificial Sequence
  GATA2 Guide RNA
agcagcccacucuggcuccca

SEQ ID NO: 30677 - RNA, 21 nt, Artificial Sequence
  GATA2 Guide RNA
agcccacucuggcucccaccu

SEQ ID NO: 30678 - RNA, 21 nt, Artificial Sequence
  GATA2 Guide RNA
aggugggagccagagugggcu

SEQ ID NO: 30679 - RNA, 21 nt, Artificial Sequence
  GATA2 Guide RNA
agugggcugcuguagggguga

SEQ ID NO: 30680 - RNA, 21 nt, Artificial Sequence
  GATA2 Guide RNA
caccccuacagcagcccacuc

SEQ ID NO: 30681 - RNA, 21 nt, Artificial Sequence
  GATA2 Guide RNA
cagagugggcugcuguagggg

SEQ ID NO: 30682 - RNA, 21 nt, Artificial Sequence
  GATA2 Guide RNA
cagcagcccacucuggcuccc

SEQ ID NO: 30683 - RNA, 21 nt, Artificial Sequence
  GATA2 Guide RNA
cagcccacucuggcucccacc

SEQ ID NO: 30684 - RNA, 21 nt, Artificial Sequence
  GATA2 Guide RNA
ccagagugggcugcuguaggg

SEQ ID NO: 30685 - RNA, 21 nt, Artificial Sequence
  GATA2 Guide RNA
ccccuacagcagcccacucug

SEQ ID NO: 30686 - RNA, 21 nt, Artificial Sequence
  GATA2 Guide RNA
cccuacagcagcccacucugg

SEQ ID NO: 30687 - RNA, 21 nt, Artificial Sequence
  GATA2 Guide RNA
ccuacagcagcccacucuggc

SEQ ID NO: 30688 - RNA, 21 nt, Artificial Sequence
  GATA2 Guide RNA
cuacagcagcccacucuggcu

SEQ ID NO: 30689 - RNA, 21 nt, Artificial Sequence
  GATA2 Guide RNA
cucaccccuacagcagcccac

SEQ ID NO: 30690 - RNA, 21 nt, Artificial Sequence
  GATA2 Guide RNA
gaaaaggugggagccagagug

SEQ ID NO: 30691 - RNA, 21 nt, Artificial Sequence
  GATA2 Guide RNA
gagugggcugcuguaggggug

SEQ ID NO: 30692 - RNA, 21 nt, Artificial Sequence
  GATA2 Guide RNA
gcagcccacucuggcucccac

SEQ ID NO: 30693 - RNA, 21 nt, Artificial Sequence
  GATA2 Guide RNA
gccagagugggcugcuguagg

SEQ ID NO: 30694 - RNA, 21 nt, Artificial Sequence
  GATA2 Guide RNA
gccucccucaccccuacagca

SEQ ID NO: 30695 - RNA, 21 nt, Artificial Sequence
  GATA2 Guide RNA
ggccucccucaccccuacagc

SEQ ID NO: 30696 - RNA, 21 nt, Artificial Sequence
  GATA2 Guide RNA
gggagccagagugggcugcug

SEQ ID NO: 30697 - RNA, 21 nt, Artificial Sequence
  GATA2 Guide RNA
gggcugcuguaggggugaggg

SEQ ID NO: 30698 - RNA, 21 nt, Artificial Sequence
  GATA2 Guide RNA
ggugggagccagagugggcug

SEQ ID NO: 30699 - RNA, 21 nt, Artificial Sequence
  GATA2 Guide RNA
guggccucccucaccccuaca

SEQ ID NO: 30700 - RNA, 21 nt, Artificial Sequence
  GATA2 Guide RNA
gugggagccagagugggcugc

SEQ ID NO: 30701 - RNA, 21 nt, Artificial Sequence
  GATA2 Guide RNA
gugggcugcuguaggggugag

SEQ ID NO: 30702 - RNA, 21 nt, Artificial Sequence
  GATA2 Guide RNA
uacagcagcccacucuggcuc

SEQ ID NO: 30703 - RNA, 21 nt, Artificial Sequence
  GATA2 Guide RNA
ucaccccuacagcagcccacu

SEQ ID NO: 30704 - RNA, 21 nt, Artificial Sequence
  GATA2 Guide RNA
uggccucccucaccccuacag

SEQ ID NO: 30705 - RNA, 21 nt, Artificial Sequence
  GATA2 Guide RNA
ugggagccagagugggcugcu

SEQ ID NO: 30706 - RNA, 21 nt, Artificial Sequence
  GATA2 Guide RNA
ugggcugcuguaggggugagg

SEQ ID NO: 30707 - RNA, 22 nt, Artificial Sequence
  GATA2 Guide RNA
aaaaggugggagccagaguggg

SEQ ID NO: 30708 - RNA, 22 nt, Artificial Sequence
  GATA2 Guide RNA
aaaggugggagccagagugggc

SEQ ID NO: 30709 - RNA, 22 nt, Artificial Sequence
  GATA2 Guide RNA
aaggugggagccagagugggcu

SEQ ID NO: 30710 - RNA, 22 nt, Artificial Sequence
  GATA2 Guide RNA
acagcagcccacucuggcuccc

SEQ ID NO: 30711 - RNA, 22 nt, Artificial Sequence
  GATA2 Guide RNA
accccuacagcagcccacucug

SEQ ID NO: 30712 - RNA, 22 nt, Artificial Sequence
  GATA2 Guide RNA
agagugggcugcuguaggggug

SEQ ID NO: 30713 - RNA, 22 nt, Artificial Sequence
  GATA2 Guide RNA
agcagcccacucuggcucccac

SEQ ID NO: 30714 - RNA, 22 nt, Artificial Sequence
  GATA2 Guide RNA
agccagagugggcugcuguagg

SEQ ID NO: 30715 - RNA, 22 nt, Artificial Sequence
  GATA2 Guide RNA
agcccacucuggcucccaccuu

SEQ ID NO: 30716 - RNA, 22 nt, Artificial Sequence
  GATA2 Guide RNA
aggugggagccagagugggcug

SEQ ID NO: 30717 - RNA, 22 nt, Artificial Sequence
  GATA2 Guide RNA
aguggccucccucaccccuaca

SEQ ID NO: 30718 - RNA, 22 nt, Artificial Sequence
  GATA2 Guide RNA
agugggcugcuguaggggugag

SEQ ID NO: 30719 - RNA, 22 nt, Artificial Sequence
  GATA2 Guide RNA
caccccuacagcagcccacucu

SEQ ID NO: 30720 - RNA, 22 nt, Artificial Sequence
  GATA2 Guide RNA
cagagugggcugcuguaggggu

SEQ ID NO: 30721 - RNA, 22 nt, Artificial Sequence
  GATA2 Guide RNA
cagcagcccacucuggcuccca

SEQ ID NO: 30722 - RNA, 22 nt, Artificial Sequence
  GATA2 Guide RNA
cagcccacucuggcucccaccu

SEQ ID NO: 30723 - RNA, 22 nt, Artificial Sequence
  GATA2 Guide RNA
ccagagugggcugcuguagggg

SEQ ID NO: 30724 - RNA, 22 nt, Artificial Sequence
  GATA2 Guide RNA
ccccuacagcagcccacucugg

SEQ ID NO: 30725 - RNA, 22 nt, Artificial Sequence
  GATA2 Guide RNA
cccuacagcagcccacucuggc

SEQ ID NO: 30726 - RNA, 22 nt, Artificial Sequence
  GATA2 Guide RNA
ccuacagcagcccacucuggcu

SEQ ID NO: 30727 - RNA, 22 nt, Artificial Sequence
  GATA2 Guide RNA
ccucaccccuacagcagcccac

SEQ ID NO: 30728 - RNA, 22 nt, Artificial Sequence
  GATA2 Guide RNA
cgaaaaggugggagccagagug

SEQ ID NO: 30729 - RNA, 22 nt, Artificial Sequence
  GATA2 Guide RNA
cuacagcagcccacucuggcuc

SEQ ID NO: 30730 - RNA, 22 nt, Artificial Sequence
  GATA2 Guide RNA
cucaccccuacagcagcccacu

SEQ ID NO: 30731 - RNA, 22 nt, Artificial Sequence
  GATA2 Guide RNA
cugcuguaggggugagggaggc

SEQ ID NO: 30732 - RNA, 22 nt, Artificial Sequence
  GATA2 Guide RNA
gaaaaggugggagccagagugg

SEQ ID NO: 30733 - RNA, 22 nt, Artificial Sequence
  GATA2 Guide RNA
gagugggcugcuguagggguga

SEQ ID NO: 30734 - RNA, 22 nt, Artificial Sequence
  GATA2 Guide RNA
gcagcccacucuggcucccacc

SEQ ID NO: 30735 - RNA, 22 nt, Artificial Sequence
  GATA2 Guide RNA
gccagagugggcugcuguaggg

SEQ ID NO: 30736 - RNA, 22 nt, Artificial Sequence
  GATA2 Guide RNA
ggccucccucaccccuacagca

SEQ ID NO: 30737 - RNA, 22 nt, Artificial Sequence
  GATA2 Guide RNA
ggugggagccagagugggcugc

SEQ ID NO: 30738 - RNA, 22 nt, Artificial Sequence
  GATA2 Guide RNA
guggccucccucaccccuacag

SEQ ID NO: 30739 - RNA, 22 nt, Artificial Sequence
  GATA2 Guide RNA
gugggagccagagugggcugcu

SEQ ID NO: 30740 - RNA, 22 nt, Artificial Sequence
  GATA2 Guide RNA
gugggcugcuguaggggugagg

SEQ ID NO: 30741 - RNA, 22 nt, Artificial Sequence
  GATA2 Guide RNA
uacagcagcccacucuggcucc

SEQ ID NO: 30742 - RNA, 22 nt, Artificial Sequence
  GATA2 Guide RNA
ucaccccuacagcagcccacuc

SEQ ID NO: 30743 - RNA, 22 nt, Artificial Sequence
  GATA2 Guide RNA
uggccucccucaccccuacagc

SEQ ID NO: 30744 - RNA, 22 nt, Artificial Sequence
  GATA2 Guide RNA
ugggagccagagugggcugcug

SEQ ID NO: 30745 - RNA, 22 nt, Artificial Sequence
  GATA2 Guide RNA
ugggcugcuguaggggugaggg

SEQ ID NO: 30746 - RNA, 20 nt, Artificial Sequence
  GATA2 Guide RNA
aacccacucuggcucccacc

SEQ ID NO: 30747 - RNA, 20 nt, Artificial Sequence
  GATA2 Guide RNA
acagcaacccacucuggcuc

SEQ ID NO: 30748 - RNA, 20 nt, Artificial Sequence
  GATA2 Guide RNA
accccuacagcaacccacuc

SEQ ID NO: 30749 - RNA, 20 nt, Artificial Sequence
  GATA2 Guide RNA
agaguggguugcuguagggg

SEQ ID NO: 30750 - RNA, 20 nt, Artificial Sequence
  GATA2 Guide RNA
agcaacccacucuggcuccc

SEQ ID NO: 30751 - RNA, 20 nt, Artificial Sequence
  GATA2 Guide RNA
agccagaguggguugcugua

SEQ ID NO: 30752 - RNA, 20 nt, Artificial Sequence
  GATA2 Guide RNA
aggugggagccagagugggu

SEQ ID NO: 30753 - RNA, 20 nt, Artificial Sequence
  GATA2 Guide RNA
aguggguugcuguaggggug

SEQ ID NO: 30754 - RNA, 20 nt, Artificial Sequence
  GATA2 Guide RNA
caacccacucuggcucccac

SEQ ID NO: 30755 - RNA, 20 nt, Artificial Sequence
  GATA2 Guide RNA
caccccuacagcaacccacu

SEQ ID NO: 30756 - RNA, 20 nt, Artificial Sequence
  GATA2 Guide RNA
cagaguggguugcuguaggg

SEQ ID NO: 30757 - RNA, 20 nt, Artificial Sequence
  GATA2 Guide RNA
cagcaacccacucuggcucc

SEQ ID NO: 30758 - RNA, 20 nt, Artificial Sequence
  GATA2 Guide RNA
ccagaguggguugcuguagg

SEQ ID NO: 30759 - RNA, 20 nt, Artificial Sequence
  GATA2 Guide RNA
ccccuacagcaacccacucu

SEQ ID NO: 30760 - RNA, 20 nt, Artificial Sequence
  GATA2 Guide RNA
cccuacagcaacccacucug

SEQ ID NO: 30761 - RNA, 20 nt, Artificial Sequence
  GATA2 Guide RNA
cccucaccccuacagcaacc

SEQ ID NO: 30762 - RNA, 20 nt, Artificial Sequence
  GATA2 Guide RNA
ccuacagcaacccacucugg

SEQ ID NO: 30763 - RNA, 20 nt, Artificial Sequence
  GATA2 Guide RNA
ccucaccccuacagcaaccc

SEQ ID NO: 30764 - RNA, 20 nt, Artificial Sequence
  GATA2 Guide RNA
cuacagcaacccacucuggc

SEQ ID NO: 30765 - RNA, 20 nt, Artificial Sequence
  GATA2 Guide RNA
cucaccccuacagcaaccca

SEQ ID NO: 30766 - RNA, 20 nt, Artificial Sequence
  GATA2 Guide RNA
cucccucaccccuacagcaa

SEQ ID NO: 30767 - RNA, 20 nt, Artificial Sequence
  GATA2 Guide RNA
gagccagaguggguugcugu

SEQ ID NO: 30768 - RNA, 20 nt, Artificial Sequence
  GATA2 Guide RNA
gaguggguugcuguaggggu

SEQ ID NO: 30769 - RNA, 20 nt, Artificial Sequence
  GATA2 Guide RNA
gcaacccacucuggcuccca

SEQ ID NO: 30770 - RNA, 20 nt, Artificial Sequence
  GATA2 Guide RNA
gccagaguggguugcuguag

SEQ ID NO: 30771 - RNA, 20 nt, Artificial Sequence
  GATA2 Guide RNA
ggagccagaguggguugcug

SEQ ID NO: 30772 - RNA, 20 nt, Artificial Sequence
  GATA2 Guide RNA
gggagccagaguggguugcu

SEQ ID NO: 30773 - RNA, 20 nt, Artificial Sequence
  GATA2 Guide RNA
ggguugcuguaggggugagg

SEQ ID NO: 30774 - RNA, 20 nt, Artificial Sequence
  GATA2 Guide RNA
ggugggagccagaguggguu

SEQ ID NO: 30775 - RNA, 20 nt, Artificial Sequence
  GATA2 Guide RNA
gguugcuguaggggugaggg

SEQ ID NO: 30776 - RNA, 20 nt, Artificial Sequence
  GATA2 Guide RNA
gugggagccagaguggguug

SEQ ID NO: 30777 - RNA, 20 nt, Artificial Sequence
  GATA2 Guide RNA
guggguugcuguagggguga

SEQ ID NO: 30778 - RNA, 20 nt, Artificial Sequence
  GATA2 Guide RNA
guugcuguaggggugaggga

SEQ ID NO: 30779 - RNA, 20 nt, Artificial Sequence
  GATA2 Guide RNA
uacagcaacccacucuggcu

SEQ ID NO: 30780 - RNA, 20 nt, Artificial Sequence
  GATA2 Guide RNA
ucaccccuacagcaacccac

SEQ ID NO: 30781 - RNA, 20 nt, Artificial Sequence
  GATA2 Guide RNA
ucccucaccccuacagcaac

SEQ ID NO: 30782 - RNA, 20 nt, Artificial Sequence
  GATA2 Guide RNA
ugggagccagaguggguugc

SEQ ID NO: 30783 - RNA, 20 nt, Artificial Sequence
  GATA2 Guide RNA
uggguugcuguaggggugag

SEQ ID NO: 30784 - RNA, 20 nt, Artificial Sequence
  GATA2 Guide RNA
uugcuguaggggugagggag

SEQ ID NO: 30785 - RNA, 21 nt, Artificial Sequence
  GATA2 Guide RNA
aacccacucuggcucccaccu

SEQ ID NO: 30786 - RNA, 21 nt, Artificial Sequence
  GATA2 Guide RNA
aaggugggagccagagugggu

SEQ ID NO: 30787 - RNA, 21 nt, Artificial Sequence
  GATA2 Guide RNA
acagcaacccacucuggcucc

SEQ ID NO: 30788 - RNA, 21 nt, Artificial Sequence
  GATA2 Guide RNA
accccuacagcaacccacucu

SEQ ID NO: 30789 - RNA, 21 nt, Artificial Sequence
  GATA2 Guide RNA
agaguggguugcuguaggggu

SEQ ID NO: 30790 - RNA, 21 nt, Artificial Sequence
  GATA2 Guide RNA
agcaacccacucuggcuccca

SEQ ID NO: 30791 - RNA, 21 nt, Artificial Sequence
  GATA2 Guide RNA
agccagaguggguugcuguag

SEQ ID NO: 30792 - RNA, 21 nt, Artificial Sequence
  GATA2 Guide RNA
aggugggagccagaguggguu

SEQ ID NO: 30793 - RNA, 21 nt, Artificial Sequence
  GATA2 Guide RNA
aguggguugcuguagggguga

SEQ ID NO: 30794 - RNA, 21 nt, Artificial Sequence
  GATA2 Guide RNA
caacccacucuggcucccacc

SEQ ID NO: 30795 - RNA, 21 nt, Artificial Sequence
  GATA2 Guide RNA
caccccuacagcaacccacuc

SEQ ID NO: 30796 - RNA, 21 nt, Artificial Sequence
  GATA2 Guide RNA
cagaguggguugcuguagggg

SEQ ID NO: 30797 - RNA, 21 nt, Artificial Sequence
  GATA2 Guide RNA
cagcaacccacucuggcuccc

SEQ ID NO: 30798 - RNA, 21 nt, Artificial Sequence
  GATA2 Guide RNA
ccagaguggguugcuguaggg

SEQ ID NO: 30799 - RNA, 21 nt, Artificial Sequence
  GATA2 Guide RNA
ccccuacagcaacccacucug

SEQ ID NO: 30800 - RNA, 21 nt, Artificial Sequence
  GATA2 Guide RNA
cccuacagcaacccacucugg

SEQ ID NO: 30801 - RNA, 21 nt, Artificial Sequence
  GATA2 Guide RNA
cccucaccccuacagcaaccc

SEQ ID NO: 30802 - RNA, 21 nt, Artificial Sequence
  GATA2 Guide RNA
ccuacagcaacccacucuggc

SEQ ID NO: 30803 - RNA, 21 nt, Artificial Sequence
  GATA2 Guide RNA
ccucaccccuacagcaaccca

SEQ ID NO: 30804 - RNA, 21 nt, Artificial Sequence
  GATA2 Guide RNA
ccucccucaccccuacagcaa

SEQ ID NO: 30805 - RNA, 21 nt, Artificial Sequence
  GATA2 Guide RNA
cuacagcaacccacucuggcu

SEQ ID NO: 30806 - RNA, 21 nt, Artificial Sequence
  GATA2 Guide RNA
cucaccccuacagcaacccac

SEQ ID NO: 30807 - RNA, 21 nt, Artificial Sequence
  GATA2 Guide RNA
cucccucaccccuacagcaac

SEQ ID NO: 30808 - RNA, 21 nt, Artificial Sequence
  GATA2 Guide RNA
gagccagaguggguugcugua

SEQ ID NO: 30809 - RNA, 21 nt, Artificial Sequence
  GATA2 Guide RNA
gaguggguugcuguaggggug

SEQ ID NO: 30810 - RNA, 21 nt, Artificial Sequence
  GATA2 Guide RNA
gcaacccacucuggcucccac

SEQ ID NO: 30811 - RNA, 21 nt, Artificial Sequence
  GATA2 Guide RNA
gccagaguggguugcuguagg

SEQ ID NO: 30812 - RNA, 21 nt, Artificial Sequence
  GATA2 Guide RNA
ggagccagaguggguugcugu

SEQ ID NO: 30813 - RNA, 21 nt, Artificial Sequence
  GATA2 Guide RNA
gggagccagaguggguugcug

SEQ ID NO: 30814 - RNA, 21 nt, Artificial Sequence
  GATA2 Guide RNA
ggguugcuguaggggugaggg

SEQ ID NO: 30815 - RNA, 21 nt, Artificial Sequence
  GATA2 Guide RNA
ggugggagccagaguggguug

SEQ ID NO: 30816 - RNA, 21 nt, Artificial Sequence
  GATA2 Guide RNA
gguugcuguaggggugaggga

SEQ ID NO: 30817 - RNA, 21 nt, Artificial Sequence
  GATA2 Guide RNA
gugggagccagaguggguugc

SEQ ID NO: 30818 - RNA, 21 nt, Artificial Sequence
  GATA2 Guide RNA
guggguugcuguaggggugag

SEQ ID NO: 30819 - RNA, 21 nt, Artificial Sequence
  GATA2 Guide RNA
guugcuguaggggugagggag

SEQ ID NO: 30820 - RNA, 21 nt, Artificial Sequence
  GATA2 Guide RNA
uacagcaacccacucuggcuc

SEQ ID NO: 30821 - RNA, 21 nt, Artificial Sequence
  GATA2 Guide RNA
ucaccccuacagcaacccacu

SEQ ID NO: 30822 - RNA, 21 nt, Artificial Sequence
  GATA2 Guide RNA
ucccucaccccuacagcaacc

SEQ ID NO: 30823 - RNA, 21 nt, Artificial Sequence
  GATA2 Guide RNA
ugggagccagaguggguugcu

SEQ ID NO: 30824 - RNA, 21 nt, Artificial Sequence
  GATA2 Guide RNA
uggguugcuguaggggugagg

SEQ ID NO: 30825 - RNA, 21 nt, Artificial Sequence
  GATA2 Guide RNA
uugcuguaggggugagggagg

SEQ ID NO: 30826 - RNA, 22 nt, Artificial Sequence
  GATA2 Guide RNA
aaaggugggagccagagugggu

SEQ ID NO: 30827 - RNA, 22 nt, Artificial Sequence
  GATA2 Guide RNA
aacccacucuggcucccaccuu

SEQ ID NO: 30828 - RNA, 22 nt, Artificial Sequence
  GATA2 Guide RNA
aaggugggagccagaguggguu

SEQ ID NO: 30829 - RNA, 22 nt, Artificial Sequence
  GATA2 Guide RNA
acagcaacccacucuggcuccc

SEQ ID NO: 30830 - RNA, 22 nt, Artificial Sequence
  GATA2 Guide RNA
accccuacagcaacccacucug

SEQ ID NO: 30831 - RNA, 22 nt, Artificial Sequence
  GATA2 Guide RNA
agaguggguugcuguaggggug

SEQ ID NO: 30832 - RNA, 22 nt, Artificial Sequence
  GATA2 Guide RNA
agcaacccacucuggcucccac

SEQ ID NO: 30833 - RNA, 22 nt, Artificial Sequence
  GATA2 Guide RNA
agccagaguggguugcuguagg

SEQ ID NO: 30834 - RNA, 22 nt, Artificial Sequence
  GATA2 Guide RNA
aggugggagccagaguggguug

SEQ ID NO: 30835 - RNA, 22 nt, Artificial Sequence
  GATA2 Guide RNA
aguggguugcuguaggggugag

SEQ ID NO: 30836 - RNA, 22 nt, Artificial Sequence
  GATA2 Guide RNA
caacccacucuggcucccaccu

SEQ ID NO: 30837 - RNA, 22 nt, Artificial Sequence
  GATA2 Guide RNA
caccccuacagcaacccacucu

SEQ ID NO: 30838 - RNA, 22 nt, Artificial Sequence
  GATA2 Guide RNA
cagaguggguugcuguaggggu

SEQ ID NO: 30839 - RNA, 22 nt, Artificial Sequence
  GATA2 Guide RNA
cagcaacccacucuggcuccca

SEQ ID NO: 30840 - RNA, 22 nt, Artificial Sequence
  GATA2 Guide RNA
ccagaguggguugcuguagggg

SEQ ID NO: 30841 - RNA, 22 nt, Artificial Sequence
  GATA2 Guide RNA
ccccuacagcaacccacucugg

SEQ ID NO: 30842 - RNA, 22 nt, Artificial Sequence
  GATA2 Guide RNA
cccuacagcaacccacucuggc

SEQ ID NO: 30843 - RNA, 22 nt, Artificial Sequence
  GATA2 Guide RNA
cccucaccccuacagcaaccca

SEQ ID NO: 30844 - RNA, 22 nt, Artificial Sequence
  GATA2 Guide RNA
ccuacagcaacccacucuggcu

SEQ ID NO: 30845 - RNA, 22 nt, Artificial Sequence
  GATA2 Guide RNA
ccucaccccuacagcaacccac

SEQ ID NO: 30846 - RNA, 22 nt, Artificial Sequence
  GATA2 Guide RNA
ccucccucaccccuacagcaac

SEQ ID NO: 30847 - RNA, 22 nt, Artificial Sequence
  GATA2 Guide RNA
cuacagcaacccacucuggcuc

SEQ ID NO: 30848 - RNA, 22 nt, Artificial Sequence
  GATA2 Guide RNA
cucaccccuacagcaacccacu

SEQ ID NO: 30849 - RNA, 22 nt, Artificial Sequence
  GATA2 Guide RNA
cucccucaccccuacagcaacc

SEQ ID NO: 30850 - RNA, 22 nt, Artificial Sequence
  GATA2 Guide RNA
gagccagaguggguugcuguag

SEQ ID NO: 30851 - RNA, 22 nt, Artificial Sequence
  GATA2 Guide RNA
gaguggguugcuguagggguga

SEQ ID NO: 30852 - RNA, 22 nt, Artificial Sequence
  GATA2 Guide RNA
gcaacccacucuggcucccacc

SEQ ID NO: 30853 - RNA, 22 nt, Artificial Sequence
  GATA2 Guide RNA
gccagaguggguugcuguaggg

SEQ ID NO: 30854 - RNA, 22 nt, Artificial Sequence
  GATA2 Guide RNA
gccucccucaccccuacagcaa

SEQ ID NO: 30855 - RNA, 22 nt, Artificial Sequence
  GATA2 Guide RNA
ggagccagaguggguugcugua

SEQ ID NO: 30856 - RNA, 22 nt, Artificial Sequence
  GATA2 Guide RNA
gggagccagaguggguugcugu

SEQ ID NO: 30857 - RNA, 22 nt, Artificial Sequence
  GATA2 Guide RNA
ggguugcuguaggggugaggga

SEQ ID NO: 30858 - RNA, 22 nt, Artificial Sequence
  GATA2 Guide RNA
ggugggagccagaguggguugc

SEQ ID NO: 30859 - RNA, 22 nt, Artificial Sequence
  GATA2 Guide RNA
gguugcuguaggggugagggag

SEQ ID NO: 30860 - RNA, 22 nt, Artificial Sequence
  GATA2 Guide RNA
gugggagccagaguggguugcu

SEQ ID NO: 30861 - RNA, 22 nt, Artificial Sequence
  GATA2 Guide RNA
guggguugcuguaggggugagg

SEQ ID NO: 30862 - RNA, 22 nt, Artificial Sequence
  GATA2 Guide RNA
guugcuguaggggugagggagg

SEQ ID NO: 30863 - RNA, 22 nt, Artificial Sequence
  GATA2 Guide RNA
uacagcaacccacucuggcucc

SEQ ID NO: 30864 - RNA, 22 nt, Artificial Sequence
  GATA2 Guide RNA
ucaccccuacagcaacccacuc

SEQ ID NO: 30865 - RNA, 22 nt, Artificial Sequence
  GATA2 Guide RNA
ucccucaccccuacagcaaccc

SEQ ID NO: 30866 - RNA, 22 nt, Artificial Sequence
  GATA2 Guide RNA
ugggagccagaguggguugcug

SEQ ID NO: 30867 - RNA, 22 nt, Artificial Sequence
  GATA2 Guide RNA
uggguugcuguaggggugaggg

SEQ ID NO: 30868 - RNA, 22 nt, Artificial Sequence
  GATA2 Guide RNA
uugcuguaggggugagggaggc

SEQ ID NO: 30869 - RNA, 20 nt, Artificial Sequence
  GATA2 Guide RNA
aaaaauuggggcgggagagg

SEQ ID NO: 30870 - RNA, 20 nt, Artificial Sequence
  GATA2 Guide RNA
aaaauuggggcgggagaggu

SEQ ID NO: 30871 - RNA, 20 nt, Artificial Sequence
  GATA2 Guide RNA
aaauuggggcgggagaggug

SEQ ID NO: 30872 - RNA, 20 nt, Artificial Sequence
  GATA2 Guide RNA
aauuggggcgggagaggugg

SEQ ID NO: 30873 - RNA, 20 nt, Artificial Sequence
  GATA2 Guide RNA
accucucccgccccaauuuu

SEQ ID NO: 30874 - RNA, 20 nt, Artificial Sequence
  GATA2 Guide RNA
agcugcugaaaaauuggggc

SEQ ID NO: 30875 - RNA, 20 nt, Artificial Sequence
  GATA2 Guide RNA
aucgagcugcugaaaaauug

SEQ ID NO: 30876 - RNA, 20 nt, Artificial Sequence
  GATA2 Guide RNA
auuggggcgggagagguggg

SEQ ID NO: 30877 - RNA, 20 nt, Artificial Sequence
  GATA2 Guide RNA
caccucucccgccccaauuu

SEQ ID NO: 30878 - RNA, 20 nt, Artificial Sequence
  GATA2 Guide RNA
ccaccucucccgccccaauu

SEQ ID NO: 30879 - RNA, 20 nt, Artificial Sequence
  GATA2 Guide RNA
cccaccucucccgccccaau

SEQ ID NO: 30880 - RNA, 20 nt, Artificial Sequence
  GATA2 Guide RNA
cccgccccaauuuuucagca

SEQ ID NO: 30881 - RNA, 20 nt, Artificial Sequence
  GATA2 Guide RNA
ccgccccaauuuuucagcag

SEQ ID NO: 30882 - RNA, 20 nt, Artificial Sequence
  GATA2 Guide RNA
ccgcugcucccaccucuccc

SEQ ID NO: 30883 - RNA, 20 nt, Artificial Sequence
  GATA2 Guide RNA
ccucucccgccccaauuuuu

SEQ ID NO: 30884 - RNA, 20 nt, Artificial Sequence
  GATA2 Guide RNA
cgagcugcugaaaaauuggg

SEQ ID NO: 30885 - RNA, 20 nt, Artificial Sequence
  GATA2 Guide RNA
cgccccaauuuuucagcagc

SEQ ID NO: 30886 - RNA, 20 nt, Artificial Sequence
  GATA2 Guide RNA
cgcugcucccaccucucccg

SEQ ID NO: 30887 - RNA, 20 nt, Artificial Sequence
  GATA2 Guide RNA
cucccaccucucccgcccca

SEQ ID NO: 30888 - RNA, 20 nt, Artificial Sequence
  GATA2 Guide RNA
cucccgccccaauuuuucag

SEQ ID NO: 30889 - RNA, 20 nt, Artificial Sequence
  GATA2 Guide RNA
cucucccgccccaauuuuuc

SEQ ID NO: 30890 - RNA, 20 nt, Artificial Sequence
  GATA2 Guide RNA
cugaaaaauuggggcgggag

SEQ ID NO: 30891 - RNA, 20 nt, Artificial Sequence
  GATA2 Guide RNA
cugcucccaccucucccgcc

SEQ ID NO: 30892 - RNA, 20 nt, Artificial Sequence
  GATA2 Guide RNA
cugcugaaaaauuggggcgg

SEQ ID NO: 30893 - RNA, 20 nt, Artificial Sequence
  GATA2 Guide RNA
gaaaaauuggggcgggagag

SEQ ID NO: 30894 - RNA, 20 nt, Artificial Sequence
  GATA2 Guide RNA
gagcugcugaaaaauugggg

SEQ ID NO: 30895 - RNA, 20 nt, Artificial Sequence
  GATA2 Guide RNA
gccccaauuuuucagcagcu

SEQ ID NO: 30896 - RNA, 20 nt, Artificial Sequence
  GATA2 Guide RNA
gccgcugcucccaccucucc

SEQ ID NO: 30897 - RNA, 20 nt, Artificial Sequence
  GATA2 Guide RNA
gcgggagaggugggagcagc

SEQ ID NO: 30898 - RNA, 20 nt, Artificial Sequence
  GATA2 Guide RNA
gcucccaccucucccgcccc

SEQ ID NO: 30899 - RNA, 20 nt, Artificial Sequence
  GATA2 Guide RNA
gcugaaaaauuggggcggga

SEQ ID NO: 30900 - RNA, 20 nt, Artificial Sequence
  GATA2 Guide RNA
gcugcucccaccucucccgc

SEQ ID NO: 30901 - RNA, 20 nt, Artificial Sequence
  GATA2 Guide RNA
gcugcugaaaaauuggggcg

SEQ ID NO: 30902 - RNA, 20 nt, Artificial Sequence
  GATA2 Guide RNA
ggccgcugcucccaccucuc

SEQ ID NO: 30903 - RNA, 20 nt, Artificial Sequence
  GATA2 Guide RNA
ggcgggagaggugggagcag

SEQ ID NO: 30904 - RNA, 20 nt, Artificial Sequence
  GATA2 Guide RNA
gggcgggagaggugggagca

SEQ ID NO: 30905 - RNA, 20 nt, Artificial Sequence
  GATA2 Guide RNA
ggggcgggagaggugggagc

SEQ ID NO: 30906 - RNA, 20 nt, Artificial Sequence
  GATA2 Guide RNA
ucccaccucucccgccccaa

SEQ ID NO: 30907 - RNA, 20 nt, Artificial Sequence
  GATA2 Guide RNA
ucccgccccaauuuuucagc

SEQ ID NO: 30908 - RNA, 20 nt, Artificial Sequence
  GATA2 Guide RNA
ucgagcugcugaaaaauugg

SEQ ID NO: 30909 - RNA, 20 nt, Artificial Sequence
  GATA2 Guide RNA
ucucccgccccaauuuuuca

SEQ ID NO: 30910 - RNA, 20 nt, Artificial Sequence
  GATA2 Guide RNA
ugaaaaauuggggcgggaga

SEQ ID NO: 30911 - RNA, 20 nt, Artificial Sequence
  GATA2 Guide RNA
ugcucccaccucucccgccc

SEQ ID NO: 30912 - RNA, 20 nt, Artificial Sequence
  GATA2 Guide RNA
ugcugaaaaauuggggcggg

SEQ ID NO: 30913 - RNA, 20 nt, Artificial Sequence
  GATA2 Guide RNA
uggggcgggagaggugggag

SEQ ID NO: 30914 - RNA, 20 nt, Artificial Sequence
  GATA2 Guide RNA
uuggggcgggagagguggga

SEQ ID NO: 30915 - RNA, 21 nt, Artificial Sequence
  GATA2 Guide RNA
aaaaauuggggcgggagaggu

SEQ ID NO: 30916 - RNA, 21 nt, Artificial Sequence
  GATA2 Guide RNA
aaaauuggggcgggagaggug

SEQ ID NO: 30917 - RNA, 21 nt, Artificial Sequence
  GATA2 Guide RNA
aaauuggggcgggagaggugg

SEQ ID NO: 30918 - RNA, 21 nt, Artificial Sequence
  GATA2 Guide RNA
aaucgagcugcugaaaaauug

SEQ ID NO: 30919 - RNA, 21 nt, Artificial Sequence
  GATA2 Guide RNA
aauuggggcgggagagguggg

SEQ ID NO: 30920 - RNA, 21 nt, Artificial Sequence
  GATA2 Guide RNA
accucucccgccccaauuuuu

SEQ ID NO: 30921 - RNA, 21 nt, Artificial Sequence
  GATA2 Guide RNA
agcugcugaaaaauuggggcg

SEQ ID NO: 30922 - RNA, 21 nt, Artificial Sequence
  GATA2 Guide RNA
aucgagcugcugaaaaauugg

SEQ ID NO: 30923 - RNA, 21 nt, Artificial Sequence
  GATA2 Guide RNA
auuggggcgggagagguggga

SEQ ID NO: 30924 - RNA, 21 nt, Artificial Sequence
  GATA2 Guide RNA
caccucucccgccccaauuuu

SEQ ID NO: 30925 - RNA, 21 nt, Artificial Sequence
  GATA2 Guide RNA
ccaccucucccgccccaauuu

SEQ ID NO: 30926 - RNA, 21 nt, Artificial Sequence
  GATA2 Guide RNA
cccaccucucccgccccaauu

SEQ ID NO: 30927 - RNA, 21 nt, Artificial Sequence
  GATA2 Guide RNA
cccgccccaauuuuucagcag

SEQ ID NO: 30928 - RNA, 21 nt, Artificial Sequence
  GATA2 Guide RNA
ccgccccaauuuuucagcagc

SEQ ID NO: 30929 - RNA, 21 nt, Artificial Sequence
  GATA2 Guide RNA
ccgcugcucccaccucucccg

SEQ ID NO: 30930 - RNA, 21 nt, Artificial Sequence
  GATA2 Guide RNA
ccucucccgccccaauuuuuc

SEQ ID NO: 30931 - RNA, 21 nt, Artificial Sequence
  GATA2 Guide RNA
cgagcugcugaaaaauugggg

SEQ ID NO: 30932 - RNA, 21 nt, Artificial Sequence
  GATA2 Guide RNA
cgccccaauuuuucagcagcu

SEQ ID NO: 30933 - RNA, 21 nt, Artificial Sequence
  GATA2 Guide RNA
cgcugcucccaccucucccgc

SEQ ID NO: 30934 - RNA, 21 nt, Artificial Sequence
  GATA2 Guide RNA
cggccgcugcucccaccucuc

SEQ ID NO: 30935 - RNA, 21 nt, Artificial Sequence
  GATA2 Guide RNA
cucccaccucucccgccccaa

SEQ ID NO: 30936 - RNA, 21 nt, Artificial Sequence
  GATA2 Guide RNA
cucccgccccaauuuuucagc

SEQ ID NO: 30937 - RNA, 21 nt, Artificial Sequence
  GATA2 Guide RNA
cucucccgccccaauuuuuca

SEQ ID NO: 30938 - RNA, 21 nt, Artificial Sequence
  GATA2 Guide RNA
cugaaaaauuggggcgggaga

SEQ ID NO: 30939 - RNA, 21 nt, Artificial Sequence
  GATA2 Guide RNA
cugcucccaccucucccgccc

SEQ ID NO: 30940 - RNA, 21 nt, Artificial Sequence
  GATA2 Guide RNA
cugcugaaaaauuggggcggg

SEQ ID NO: 30941 - RNA, 21 nt, Artificial Sequence
  GATA2 Guide RNA
gaaaaauuggggcgggagagg

SEQ ID NO: 30942 - RNA, 21 nt, Artificial Sequence
  GATA2 Guide RNA
gagcugcugaaaaauuggggc

SEQ ID NO: 30943 - RNA, 21 nt, Artificial Sequence
  GATA2 Guide RNA
gccccaauuuuucagcagcuc

SEQ ID NO: 30944 - RNA, 21 nt, Artificial Sequence
  GATA2 Guide RNA
gccgcugcucccaccucuccc

SEQ ID NO: 30945 - RNA, 21 nt, Artificial Sequence
  GATA2 Guide RNA
gcgggagaggugggagcagcg

SEQ ID NO: 30946 - RNA, 21 nt, Artificial Sequence
  GATA2 Guide RNA
gcucccaccucucccgcccca

SEQ ID NO: 30947 - RNA, 21 nt, Artificial Sequence
  GATA2 Guide RNA
gcugaaaaauuggggcgggag

SEQ ID NO: 30948 - RNA, 21 nt, Artificial Sequence
  GATA2 Guide RNA
gcugcucccaccucucccgcc

SEQ ID NO: 30949 - RNA, 21 nt, Artificial Sequence
  GATA2 Guide RNA
gcugcugaaaaauuggggcgg

SEQ ID NO: 30950 - RNA, 21 nt, Artificial Sequence
  GATA2 Guide RNA
ggccgcugcucccaccucucc

SEQ ID NO: 30951 - RNA, 21 nt, Artificial Sequence
  GATA2 Guide RNA
ggcgggagaggugggagcagc

SEQ ID NO: 30952 - RNA, 21 nt, Artificial Sequence
  GATA2 Guide RNA
gggcgggagaggugggagcag

SEQ ID NO: 30953 - RNA, 21 nt, Artificial Sequence
  GATA2 Guide RNA
ggggcgggagaggugggagca

SEQ ID NO: 30954 - RNA, 21 nt, Artificial Sequence
  GATA2 Guide RNA
ucccaccucucccgccccaau

SEQ ID NO: 30955 - RNA, 21 nt, Artificial Sequence
  GATA2 Guide RNA
ucccgccccaauuuuucagca

SEQ ID NO: 30956 - RNA, 21 nt, Artificial Sequence
  GATA2 Guide RNA
ucgagcugcugaaaaauuggg

SEQ ID NO: 30957 - RNA, 21 nt, Artificial Sequence
  GATA2 Guide RNA
ucucccgccccaauuuuucag

SEQ ID NO: 30958 - RNA, 21 nt, Artificial Sequence
  GATA2 Guide RNA
ugaaaaauuggggcgggagag

SEQ ID NO: 30959 - RNA, 21 nt, Artificial Sequence
  GATA2 Guide RNA
ugcucccaccucucccgcccc

SEQ ID NO: 30960 - RNA, 21 nt, Artificial Sequence
  GATA2 Guide RNA
ugcugaaaaauuggggcggga

SEQ ID NO: 30961 - RNA, 21 nt, Artificial Sequence
  GATA2 Guide RNA
uggggcgggagaggugggagc

SEQ ID NO: 30962 - RNA, 21 nt, Artificial Sequence
  GATA2 Guide RNA
uuggggcgggagaggugggag

SEQ ID NO: 30963 - RNA, 22 nt, Artificial Sequence
  GATA2 Guide RNA
aaaaauuggggcgggagaggug

SEQ ID NO: 30964 - RNA, 22 nt, Artificial Sequence
  GATA2 Guide RNA
aaaauuggggcgggagaggugg

SEQ ID NO: 30965 - RNA, 22 nt, Artificial Sequence
  GATA2 Guide RNA
aaauuggggcgggagagguggg

SEQ ID NO: 30966 - RNA, 22 nt, Artificial Sequence
  GATA2 Guide RNA
aaucgagcugcugaaaaauugg

SEQ ID NO: 30967 - RNA, 22 nt, Artificial Sequence
  GATA2 Guide RNA
aauuggggcgggagagguggga

SEQ ID NO: 30968 - RNA, 22 nt, Artificial Sequence
  GATA2 Guide RNA
accucucccgccccaauuuuuc

SEQ ID NO: 30969 - RNA, 22 nt, Artificial Sequence
  GATA2 Guide RNA
agcugcugaaaaauuggggcgg

SEQ ID NO: 30970 - RNA, 22 nt, Artificial Sequence
  GATA2 Guide RNA
aucgagcugcugaaaaauuggg

SEQ ID NO: 30971 - RNA, 22 nt, Artificial Sequence
  GATA2 Guide RNA
auuggggcgggagaggugggag

SEQ ID NO: 30972 - RNA, 22 nt, Artificial Sequence
  GATA2 Guide RNA
caccucucccgccccaauuuuu

SEQ ID NO: 30973 - RNA, 22 nt, Artificial Sequence
  GATA2 Guide RNA
ccaccucucccgccccaauuuu

SEQ ID NO: 30974 - RNA, 22 nt, Artificial Sequence
  GATA2 Guide RNA
cccaccucucccgccccaauuu

SEQ ID NO: 30975 - RNA, 22 nt, Artificial Sequence
  GATA2 Guide RNA
cccgccccaauuuuucagcagc

SEQ ID NO: 30976 - RNA, 22 nt, Artificial Sequence
  GATA2 Guide RNA
ccgccccaauuuuucagcagcu

SEQ ID NO: 30977 - RNA, 22 nt, Artificial Sequence
  GATA2 Guide RNA
ccgcugcucccaccucucccgc

SEQ ID NO: 30978 - RNA, 22 nt, Artificial Sequence
  GATA2 Guide RNA
ccucucccgccccaauuuuuca

SEQ ID NO: 30979 - RNA, 22 nt, Artificial Sequence
  GATA2 Guide RNA
cgagcugcugaaaaauuggggc

SEQ ID NO: 30980 - RNA, 22 nt, Artificial Sequence
  GATA2 Guide RNA
cgccccaauuuuucagcagcuc

SEQ ID NO: 30981 - RNA, 22 nt, Artificial Sequence
  GATA2 Guide RNA
cgcugcucccaccucucccgcc

SEQ ID NO: 30982 - RNA, 22 nt, Artificial Sequence
  GATA2 Guide RNA
cggccgcugcucccaccucucc

SEQ ID NO: 30983 - RNA, 22 nt, Artificial Sequence
  GATA2 Guide RNA
cucccaccucucccgccccaau

SEQ ID NO: 30984 - RNA, 22 nt, Artificial Sequence
  GATA2 Guide RNA
cucccgccccaauuuuucagca

SEQ ID NO: 30985 - RNA, 22 nt, Artificial Sequence
  GATA2 Guide RNA
cucucccgccccaauuuuucag

SEQ ID NO: 30986 - RNA, 22 nt, Artificial Sequence
  GATA2 Guide RNA
cugaaaaauuggggcgggagag

SEQ ID NO: 30987 - RNA, 22 nt, Artificial Sequence
  GATA2 Guide RNA
cugcucccaccucucccgcccc

SEQ ID NO: 30988 - RNA, 22 nt, Artificial Sequence
  GATA2 Guide RNA
cugcugaaaaauuggggcggga

SEQ ID NO: 30989 - RNA, 22 nt, Artificial Sequence
  GATA2 Guide RNA
gaaaaauuggggcgggagaggu

SEQ ID NO: 30990 - RNA, 22 nt, Artificial Sequence
  GATA2 Guide RNA
gaaucgagcugcugaaaaauug

SEQ ID NO: 30991 - RNA, 22 nt, Artificial Sequence
  GATA2 Guide RNA
gagcugcugaaaaauuggggcg

SEQ ID NO: 30992 - RNA, 22 nt, Artificial Sequence
  GATA2 Guide RNA
gccccaauuuuucagcagcucg

SEQ ID NO: 30993 - RNA, 22 nt, Artificial Sequence
  GATA2 Guide RNA
gccgcugcucccaccucucccg

SEQ ID NO: 30994 - RNA, 22 nt, Artificial Sequence
  GATA2 Guide RNA
gcgggagaggugggagcagcgg

SEQ ID NO: 30995 - RNA, 22 nt, Artificial Sequence
  GATA2 Guide RNA
gcucccaccucucccgccccaa

SEQ ID NO: 30996 - RNA, 22 nt, Artificial Sequence
  GATA2 Guide RNA
gcugaaaaauuggggcgggaga

SEQ ID NO: 30997 - RNA, 22 nt, Artificial Sequence
  GATA2 Guide RNA
gcugcucccaccucucccgccc

SEQ ID NO: 30998 - RNA, 22 nt, Artificial Sequence
  GATA2 Guide RNA
gcugcugaaaaauuggggcggg

SEQ ID NO: 30999 - RNA, 22 nt, Artificial Sequence
  GATA2 Guide RNA
ggccgcugcucccaccucuccc

SEQ ID NO: 31000 - RNA, 22 nt, Artificial Sequence
  GATA2 Guide RNA
ggcgggagaggugggagcagcg

SEQ ID NO: 31001 - RNA, 22 nt, Artificial Sequence
  GATA2 Guide RNA
gggcgggagaggugggagcagc

SEQ ID NO: 31002 - RNA, 22 nt, Artificial Sequence
  GATA2 Guide RNA
ggggcgggagaggugggagcag

SEQ ID NO: 31003 - RNA, 22 nt, Artificial Sequence
  GATA2 Guide RNA
ucccaccucucccgccccaauu

SEQ ID NO: 31004 - RNA, 22 nt, Artificial Sequence
  GATA2 Guide RNA
ucccgccccaauuuuucagcag

SEQ ID NO: 31005 - RNA, 22 nt, Artificial Sequence
  GATA2 Guide RNA
ucgagcugcugaaaaauugggg

SEQ ID NO: 31006 - RNA, 22 nt, Artificial Sequence
  GATA2 Guide RNA
ucggccgcugcucccaccucuc

SEQ ID NO: 31007 - RNA, 22 nt, Artificial Sequence
  GATA2 Guide RNA
ucucccgccccaauuuuucagc

SEQ ID NO: 31008 - RNA, 22 nt, Artificial Sequence
  GATA2 Guide RNA
ugaaaaauuggggcgggagagg

SEQ ID NO: 31009 - RNA, 22 nt, Artificial Sequence
  GATA2 Guide RNA
ugcucccaccucucccgcccca

SEQ ID NO: 31010 - RNA, 22 nt, Artificial Sequence
  GATA2 Guide RNA
ugcugaaaaauuggggcgggag

SEQ ID NO: 31011 - RNA, 22 nt, Artificial Sequence
  GATA2 Guide RNA
uggggcgggagaggugggagca

SEQ ID NO: 31012 - RNA, 22 nt, Artificial Sequence
  GATA2 Guide RNA
uuggggcgggagaggugggagc

SEQ ID NO: 31013 - RNA, 20 nt, Artificial Sequence
  GATA2 Guide RNA
aaaaauuggggugggagagg

SEQ ID NO: 31014 - RNA, 20 nt, Artificial Sequence
  GATA2 Guide RNA
aaaauuggggugggagaggu

SEQ ID NO: 31015 - RNA, 20 nt, Artificial Sequence
  GATA2 Guide RNA
aaauuggggugggagaggug

SEQ ID NO: 31016 - RNA, 20 nt, Artificial Sequence
  GATA2 Guide RNA
aauuggggugggagaggugg

SEQ ID NO: 31017 - RNA, 20 nt, Artificial Sequence
  GATA2 Guide RNA
accccaauuuuucagcagcu

SEQ ID NO: 31018 - RNA, 20 nt, Artificial Sequence
  GATA2 Guide RNA
accucucccaccccaauuuu

SEQ ID NO: 31019 - RNA, 20 nt, Artificial Sequence
  GATA2 Guide RNA
agcugcugaaaaauuggggu

SEQ ID NO: 31020 - RNA, 20 nt, Artificial Sequence
  GATA2 Guide RNA
auuggggugggagagguggg

SEQ ID NO: 31021 - RNA, 20 nt, Artificial Sequence
  GATA2 Guide RNA
caccccaauuuuucagcagc

SEQ ID NO: 31022 - RNA, 20 nt, Artificial Sequence
  GATA2 Guide RNA
caccucucccaccccaauuu

SEQ ID NO: 31023 - RNA, 20 nt, Artificial Sequence
  GATA2 Guide RNA
ccaccccaauuuuucagcag

SEQ ID NO: 31024 - RNA, 20 nt, Artificial Sequence
  GATA2 Guide RNA
ccaccucucccaccccaauu

SEQ ID NO: 31025 - RNA, 20 nt, Artificial Sequence
  GATA2 Guide RNA
cccaccccaauuuuucagca

SEQ ID NO: 31026 - RNA, 20 nt, Artificial Sequence
  GATA2 Guide RNA
cccaccucucccaccccaau

SEQ ID NO: 31027 - RNA, 20 nt, Artificial Sequence
  GATA2 Guide RNA
ccucucccaccccaauuuuu

SEQ ID NO: 31028 - RNA, 20 nt, Artificial Sequence
  GATA2 Guide RNA
cgcugcucccaccucuccca

SEQ ID NO: 31029 - RNA, 20 nt, Artificial Sequence
  GATA2 Guide RNA
cucccaccccaauuuuucag

SEQ ID NO: 31030 - RNA, 20 nt, Artificial Sequence
  GATA2 Guide RNA
cucccaccucucccacccca

SEQ ID NO: 31031 - RNA, 20 nt, Artificial Sequence
  GATA2 Guide RNA
cucucccaccccaauuuuuc

SEQ ID NO: 31032 - RNA, 20 nt, Artificial Sequence
  GATA2 Guide RNA
cugaaaaauuggggugggag

SEQ ID NO: 31033 - RNA, 20 nt, Artificial Sequence
  GATA2 Guide RNA
cugcucccaccucucccacc

SEQ ID NO: 31034 - RNA, 20 nt, Artificial Sequence
  GATA2 Guide RNA
cugcugaaaaauuggggugg

SEQ ID NO: 31035 - RNA, 20 nt, Artificial Sequence
  GATA2 Guide RNA
gaaaaauuggggugggagag

SEQ ID NO: 31036 - RNA, 20 nt, Artificial Sequence
  GATA2 Guide RNA
gcucccaccucucccacccc

SEQ ID NO: 31037 - RNA, 20 nt, Artificial Sequence
  GATA2 Guide RNA
gcugaaaaauugggguggga

SEQ ID NO: 31038 - RNA, 20 nt, Artificial Sequence
  GATA2 Guide RNA
gcugcucccaccucucccac

SEQ ID NO: 31039 - RNA, 20 nt, Artificial Sequence
  GATA2 Guide RNA
gcugcugaaaaauuggggug

SEQ ID NO: 31040 - RNA, 20 nt, Artificial Sequence
  GATA2 Guide RNA
ggggugggagaggugggagc

SEQ ID NO: 31041 - RNA, 20 nt, Artificial Sequence
  GATA2 Guide RNA
gggugggagaggugggagca

SEQ ID NO: 31042 - RNA, 20 nt, Artificial Sequence
  GATA2 Guide RNA
ggugggagaggugggagcag

SEQ ID NO: 31043 - RNA, 20 nt, Artificial Sequence
  GATA2 Guide RNA
gugggagaggugggagcagc

SEQ ID NO: 31044 - RNA, 20 nt, Artificial Sequence
  GATA2 Guide RNA
ucccaccccaauuuuucagc

SEQ ID NO: 31045 - RNA, 20 nt, Artificial Sequence
  GATA2 Guide RNA
ucccaccucucccaccccaa

SEQ ID NO: 31046 - RNA, 20 nt, Artificial Sequence
  GATA2 Guide RNA
ucucccaccccaauuuuuca

SEQ ID NO: 31047 - RNA, 20 nt, Artificial Sequence
  GATA2 Guide RNA
ugaaaaauuggggugggaga

SEQ ID NO: 31048 - RNA, 20 nt, Artificial Sequence
  GATA2 Guide RNA
ugcucccaccucucccaccc

SEQ ID NO: 31049 - RNA, 20 nt, Artificial Sequence
  GATA2 Guide RNA
ugcugaaaaauugggguggg

SEQ ID NO: 31050 - RNA, 20 nt, Artificial Sequence
  GATA2 Guide RNA
uggggugggagaggugggag

SEQ ID NO: 31051 - RNA, 20 nt, Artificial Sequence
  GATA2 Guide RNA
uuggggugggagagguggga

SEQ ID NO: 31052 - RNA, 21 nt, Artificial Sequence
  GATA2 Guide RNA
aaaaauuggggugggagaggu

SEQ ID NO: 31053 - RNA, 21 nt, Artificial Sequence
  GATA2 Guide RNA
aaaauuggggugggagaggug

SEQ ID NO: 31054 - RNA, 21 nt, Artificial Sequence
  GATA2 Guide RNA
aaauuggggugggagaggugg

SEQ ID NO: 31055 - RNA, 21 nt, Artificial Sequence
  GATA2 Guide RNA
aauuggggugggagagguggg

SEQ ID NO: 31056 - RNA, 21 nt, Artificial Sequence
  GATA2 Guide RNA
accccaauuuuucagcagcuc

SEQ ID NO: 31057 - RNA, 21 nt, Artificial Sequence
  GATA2 Guide RNA
accucucccaccccaauuuuu

SEQ ID NO: 31058 - RNA, 21 nt, Artificial Sequence
  GATA2 Guide RNA
agcugcugaaaaauuggggug

SEQ ID NO: 31059 - RNA, 21 nt, Artificial Sequence
  GATA2 Guide RNA
auuggggugggagagguggga

SEQ ID NO: 31060 - RNA, 21 nt, Artificial Sequence
  GATA2 Guide RNA
caccccaauuuuucagcagcu

SEQ ID NO: 31061 - RNA, 21 nt, Artificial Sequence
  GATA2 Guide RNA
caccucucccaccccaauuuu

SEQ ID NO: 31062 - RNA, 21 nt, Artificial Sequence
  GATA2 Guide RNA
ccaccccaauuuuucagcagc

SEQ ID NO: 31063 - RNA, 21 nt, Artificial Sequence
  GATA2 Guide RNA
ccaccucucccaccccaauuu

SEQ ID NO: 31064 - RNA, 21 nt, Artificial Sequence
  GATA2 Guide RNA
cccaccccaauuuuucagcag

SEQ ID NO: 31065 - RNA, 21 nt, Artificial Sequence
  GATA2 Guide RNA
cccaccucucccaccccaauu

SEQ ID NO: 31066 - RNA, 21 nt, Artificial Sequence
  GATA2 Guide RNA
ccgcugcucccaccucuccca

SEQ ID NO: 31067 - RNA, 21 nt, Artificial Sequence
  GATA2 Guide RNA
ccucucccaccccaauuuuuc

SEQ ID NO: 31068 - RNA, 21 nt, Artificial Sequence
  GATA2 Guide RNA
cgcugcucccaccucucccac

SEQ ID NO: 31069 - RNA, 21 nt, Artificial Sequence
  GATA2 Guide RNA
cucccaccccaauuuuucagc

SEQ ID NO: 31070 - RNA, 21 nt, Artificial Sequence
  GATA2 Guide RNA
cucccaccucucccaccccaa

SEQ ID NO: 31071 - RNA, 21 nt, Artificial Sequence
  GATA2 Guide RNA
cucucccaccccaauuuuuca

SEQ ID NO: 31072 - RNA, 21 nt, Artificial Sequence
  GATA2 Guide RNA
cugaaaaauuggggugggaga

SEQ ID NO: 31073 - RNA, 21 nt, Artificial Sequence
  GATA2 Guide RNA
cugcucccaccucucccaccc

SEQ ID NO: 31074 - RNA, 21 nt, Artificial Sequence
  GATA2 Guide RNA
cugcugaaaaauugggguggg

SEQ ID NO: 31075 - RNA, 21 nt, Artificial Sequence
  GATA2 Guide RNA
gaaaaauuggggugggagagg

SEQ ID NO: 31076 - RNA, 21 nt, Artificial Sequence
  GATA2 Guide RNA
gagcugcugaaaaauuggggu

SEQ ID NO: 31077 - RNA, 21 nt, Artificial Sequence
  GATA2 Guide RNA
gcucccaccucucccacccca

SEQ ID NO: 31078 - RNA, 21 nt, Artificial Sequence
  GATA2 Guide RNA
gcugaaaaauuggggugggag

SEQ ID NO: 31079 - RNA, 21 nt, Artificial Sequence
  GATA2 Guide RNA
gcugcucccaccucucccacc

SEQ ID NO: 31080 - RNA, 21 nt, Artificial Sequence
  GATA2 Guide RNA
gcugcugaaaaauuggggugg

SEQ ID NO: 31081 - RNA, 21 nt, Artificial Sequence
  GATA2 Guide RNA
ggggugggagaggugggagca

SEQ ID NO: 31082 - RNA, 21 nt, Artificial Sequence
  GATA2 Guide RNA
gggugggagaggugggagcag

SEQ ID NO: 31083 - RNA, 21 nt, Artificial Sequence
  GATA2 Guide RNA
ggugggagaggugggagcagc

SEQ ID NO: 31084 - RNA, 21 nt, Artificial Sequence
  GATA2 Guide RNA
gugggagaggugggagcagcg

SEQ ID NO: 31085 - RNA, 21 nt, Artificial Sequence
  GATA2 Guide RNA
ucccaccccaauuuuucagca

SEQ ID NO: 31086 - RNA, 21 nt, Artificial Sequence
  GATA2 Guide RNA
ucccaccucucccaccccaau

SEQ ID NO: 31087 - RNA, 21 nt, Artificial Sequence
  GATA2 Guide RNA
ucucccaccccaauuuuucag

SEQ ID NO: 31088 - RNA, 21 nt, Artificial Sequence
  GATA2 Guide RNA
ugaaaaauuggggugggagag

SEQ ID NO: 31089 - RNA, 21 nt, Artificial Sequence
  GATA2 Guide RNA
ugcucccaccucucccacccc

SEQ ID NO: 31090 - RNA, 21 nt, Artificial Sequence
  GATA2 Guide RNA
ugcugaaaaauugggguggga

SEQ ID NO: 31091 - RNA, 21 nt, Artificial Sequence
  GATA2 Guide RNA
uggggugggagaggugggagc

SEQ ID NO: 31092 - RNA, 21 nt, Artificial Sequence
  GATA2 Guide RNA
uuggggugggagaggugggag

SEQ ID NO: 31093 - RNA, 22 nt, Artificial Sequence
  GATA2 Guide RNA
aaaaauuggggugggagaggug

SEQ ID NO: 31094 - RNA, 22 nt, Artificial Sequence
  GATA2 Guide RNA
aaaauuggggugggagaggugg

SEQ ID NO: 31095 - RNA, 22 nt, Artificial Sequence
  GATA2 Guide RNA
aaauuggggugggagagguggg

SEQ ID NO: 31096 - RNA, 22 nt, Artificial Sequence
  GATA2 Guide RNA
aauuggggugggagagguggga

SEQ ID NO: 31097 - RNA, 22 nt, Artificial Sequence
  GATA2 Guide RNA
accccaauuuuucagcagcucg

SEQ ID NO: 31098 - RNA, 22 nt, Artificial Sequence
  GATA2 Guide RNA
accucucccaccccaauuuuuc

SEQ ID NO: 31099 - RNA, 22 nt, Artificial Sequence
  GATA2 Guide RNA
agcugcugaaaaauuggggugg

SEQ ID NO: 31100 - RNA, 22 nt, Artificial Sequence
  GATA2 Guide RNA
auuggggugggagaggugggag

SEQ ID NO: 31101 - RNA, 22 nt, Artificial Sequence
  GATA2 Guide RNA
caccccaauuuuucagcagcuc

SEQ ID NO: 31102 - RNA, 22 nt, Artificial Sequence
  GATA2 Guide RNA
caccucucccaccccaauuuuu

SEQ ID NO: 31103 - RNA, 22 nt, Artificial Sequence
  GATA2 Guide RNA
ccaccccaauuuuucagcagcu

SEQ ID NO: 31104 - RNA, 22 nt, Artificial Sequence
  GATA2 Guide RNA
ccaccucucccaccccaauuuu

SEQ ID NO: 31105 - RNA, 22 nt, Artificial Sequence
  GATA2 Guide RNA
cccaccccaauuuuucagcagc

SEQ ID NO: 31106 - RNA, 22 nt, Artificial Sequence
  GATA2 Guide RNA
cccaccucucccaccccaauuu

SEQ ID NO: 31107 - RNA, 22 nt, Artificial Sequence
  GATA2 Guide RNA
ccgcugcucccaccucucccac

SEQ ID NO: 31108 - RNA, 22 nt, Artificial Sequence
  GATA2 Guide RNA
ccucucccaccccaauuuuuca

SEQ ID NO: 31109 - RNA, 22 nt, Artificial Sequence
  GATA2 Guide RNA
cgagcugcugaaaaauuggggu

SEQ ID NO: 31110 - RNA, 22 nt, Artificial Sequence
  GATA2 Guide RNA
cgcugcucccaccucucccacc

SEQ ID NO: 31111 - RNA, 22 nt, Artificial Sequence
  GATA2 Guide RNA
cucccaccccaauuuuucagca

SEQ ID NO: 31112 - RNA, 22 nt, Artificial Sequence
  GATA2 Guide RNA
cucccaccucucccaccccaau

SEQ ID NO: 31113 - RNA, 22 nt, Artificial Sequence
  GATA2 Guide RNA
cucucccaccccaauuuuucag

SEQ ID NO: 31114 - RNA, 22 nt, Artificial Sequence
  GATA2 Guide RNA
cugaaaaauuggggugggagag

SEQ ID NO: 31115 - RNA, 22 nt, Artificial Sequence
  GATA2 Guide RNA
cugcucccaccucucccacccc

SEQ ID NO: 31116 - RNA, 22 nt, Artificial Sequence
  GATA2 Guide RNA
cugcugaaaaauugggguggga

SEQ ID NO: 31117 - RNA, 22 nt, Artificial Sequence
  GATA2 Guide RNA
gaaaaauuggggugggagaggu

SEQ ID NO: 31118 - RNA, 22 nt, Artificial Sequence
  GATA2 Guide RNA
gagcugcugaaaaauuggggug

SEQ ID NO: 31119 - RNA, 22 nt, Artificial Sequence
  GATA2 Guide RNA
gccgcugcucccaccucuccca

SEQ ID NO: 31120 - RNA, 22 nt, Artificial Sequence
  GATA2 Guide RNA
gcucccaccucucccaccccaa

SEQ ID NO: 31121 - RNA, 22 nt, Artificial Sequence
  GATA2 Guide RNA
gcugaaaaauuggggugggaga

SEQ ID NO: 31122 - RNA, 22 nt, Artificial Sequence
  GATA2 Guide RNA
gcugcucccaccucucccaccc

SEQ ID NO: 31123 - RNA, 22 nt, Artificial Sequence
  GATA2 Guide RNA
gcugcugaaaaauugggguggg

SEQ ID NO: 31124 - RNA, 22 nt, Artificial Sequence
  GATA2 Guide RNA
ggggugggagaggugggagcag

SEQ ID NO: 31125 - RNA, 22 nt, Artificial Sequence
  GATA2 Guide RNA
gggugggagaggugggagcagc

SEQ ID NO: 31126 - RNA, 22 nt, Artificial Sequence
  GATA2 Guide RNA
ggugggagaggugggagcagcg

SEQ ID NO: 31127 - RNA, 22 nt, Artificial Sequence
  GATA2 Guide RNA
gugggagaggugggagcagcgg

SEQ ID NO: 31128 - RNA, 22 nt, Artificial Sequence
  GATA2 Guide RNA
ucccaccccaauuuuucagcag

SEQ ID NO: 31129 - RNA, 22 nt, Artificial Sequence
  GATA2 Guide RNA
ucccaccucucccaccccaauu

SEQ ID NO: 31130 - RNA, 22 nt, Artificial Sequence
  GATA2 Guide RNA
ucucccaccccaauuuuucagc

SEQ ID NO: 31131 - RNA, 22 nt, Artificial Sequence
  GATA2 Guide RNA
ugaaaaauuggggugggagagg

SEQ ID NO: 31132 - RNA, 22 nt, Artificial Sequence
  GATA2 Guide RNA
ugcucccaccucucccacccca

SEQ ID NO: 31133 - RNA, 22 nt, Artificial Sequence
  GATA2 Guide RNA
ugcugaaaaauuggggugggag

SEQ ID NO: 31134 - RNA, 22 nt, Artificial Sequence
  GATA2 Guide RNA
uggggugggagaggugggagca

SEQ ID NO: 31135 - RNA, 22 nt, Artificial Sequence
  GATA2 Guide RNA
uuggggugggagaggugggagc

SEQ ID NO: 31136 - RNA, 20 nt, Artificial Sequence
  GATA2 Guide RNA
ccauccagcgcggcugcucg

SEQ ID NO: 31137 - RNA, 20 nt, Artificial Sequence
  GATA2 Guide RNA
ccauggagguggcgcccgag

SEQ ID NO: 31138 - RNA, 20 nt, Artificial Sequence
  GATA2 Guide RNA
cccgagcagccgcgcuggau

SEQ ID NO: 31139 - RNA, 20 nt, Artificial Sequence
  GATA2 Guide RNA
ccgagcagccgcgcuggaug

SEQ ID NO: 31140 - RNA, 20 nt, Artificial Sequence
  GATA2 Guide RNA
ccgccggccauggagguggc

SEQ ID NO: 31141 - RNA, 20 nt, Artificial Sequence
  GATA2 Guide RNA
cggcugcucgggcgccaccu

SEQ ID NO: 31142 - RNA, 20 nt, Artificial Sequence
  GATA2 Guide RNA
cugcucgggcgccaccucca

SEQ ID NO: 31143 - RNA, 20 nt, Artificial Sequence
  GATA2 Guide RNA
gagguggcgcccgagcagcc

SEQ ID NO: 31144 - RNA, 20 nt, Artificial Sequence
  GATA2 Guide RNA
gccauccagcgcggcugcuc

SEQ ID NO: 31145 - RNA, 20 nt, Artificial Sequence
  GATA2 Guide RNA
gccauggagguggcgcccga

SEQ ID NO: 31146 - RNA, 20 nt, Artificial Sequence
  GATA2 Guide RNA
gcccgagcagccgcgcugga

SEQ ID NO: 31147 - RNA, 20 nt, Artificial Sequence
  GATA2 Guide RNA
gcucgggcgccaccuccaug

SEQ ID NO: 31148 - RNA, 20 nt, Artificial Sequence
  GATA2 Guide RNA
gcugcucgggcgccaccucc

SEQ ID NO: 31149 - RNA, 20 nt, Artificial Sequence
  GATA2 Guide RNA
ggccauggagguggcgcccg

SEQ ID NO: 31150 - RNA, 20 nt, Artificial Sequence
  GATA2 Guide RNA
ggcugcucgggcgccaccuc

SEQ ID NO: 31151 - RNA, 20 nt, Artificial Sequence
  GATA2 Guide RNA
gggcgccaccuccauggccg

SEQ ID NO: 31152 - RNA, 20 nt, Artificial Sequence
  GATA2 Guide RNA
ugcucgggcgccaccuccau

SEQ ID NO: 31153 - RNA, 21 nt, Artificial Sequence
  GATA2 Guide RNA
cccgagcagccgcgcuggaug

SEQ ID NO: 31154 - RNA, 21 nt, Artificial Sequence
  GATA2 Guide RNA
ccgagcagccgcgcuggaugg

SEQ ID NO: 31155 - RNA, 21 nt, Artificial Sequence
  GATA2 Guide RNA
cgccauccagcgcggcugcuc

SEQ ID NO: 31156 - RNA, 21 nt, Artificial Sequence
  GATA2 Guide RNA
cugcucgggcgccaccuccau

SEQ ID NO: 31157 - RNA, 21 nt, Artificial Sequence
  GATA2 Guide RNA
gccauccagcgcggcugcucg

SEQ ID NO: 31158 - RNA, 21 nt, Artificial Sequence
  GATA2 Guide RNA
gccauggagguggcgcccgag

SEQ ID NO: 31159 - RNA, 21 nt, Artificial Sequence
  GATA2 Guide RNA
gcccgagcagccgcgcuggau

SEQ ID NO: 31160 - RNA, 21 nt, Artificial Sequence
  GATA2 Guide RNA
gcugcucgggcgccaccucca

SEQ ID NO: 31161 - RNA, 21 nt, Artificial Sequence
  GATA2 Guide RNA
ggccauggagguggcgcccga

SEQ ID NO: 31162 - RNA, 21 nt, Artificial Sequence
  GATA2 Guide RNA
ugcucgggcgccaccuccaug

SEQ ID NO: 31163 - RNA, 22 nt, Artificial Sequence
  GATA2 Guide RNA
auccagcgcggcugcucgggcg

SEQ ID NO: 31164 - RNA, 22 nt, Artificial Sequence
  GATA2 Guide RNA
cccgagcagccgcgcuggaugg

SEQ ID NO: 31165 - RNA, 22 nt, Artificial Sequence
  GATA2 Guide RNA
ccgagcagccgcgcuggauggc

SEQ ID NO: 31166 - RNA, 22 nt, Artificial Sequence
  GATA2 Guide RNA
cgccauccagcgcggcugcucg

SEQ ID NO: 31167 - RNA, 22 nt, Artificial Sequence
  GATA2 Guide RNA
cgcccgagcagccgcgcuggau

SEQ ID NO: 31168 - RNA, 22 nt, Artificial Sequence
  GATA2 Guide RNA
cggccauggagguggcgcccga

SEQ ID NO: 31169 - RNA, 22 nt, Artificial Sequence
  GATA2 Guide RNA
cugcucgggcgccaccuccaug

SEQ ID NO: 31170 - RNA, 22 nt, Artificial Sequence
  GATA2 Guide RNA
gcccgagcagccgcgcuggaug

SEQ ID NO: 31171 - RNA, 22 nt, Artificial Sequence
  GATA2 Guide RNA
gcgccauccagcgcggcugcuc

SEQ ID NO: 31172 - RNA, 22 nt, Artificial Sequence
  GATA2 Guide RNA
gcugcucgggcgccaccuccau

SEQ ID NO: 31173 - RNA, 22 nt, Artificial Sequence
  GATA2 Guide RNA
ggccauggagguggcgcccgag

SEQ ID NO: 31174 - RNA, 22 nt, Artificial Sequence
  GATA2 Guide RNA
ggcugcucgggcgccaccucca

SEQ ID NO: 31175 - RNA, 22 nt, Artificial Sequence
  GATA2 Guide RNA
ucgggcgccaccuccauggccg

SEQ ID NO: 31176 - RNA, 22 nt, Artificial Sequence
  GATA2 Guide RNA
uggagguggcgcccgagcagcc

SEQ ID NO: 31177 - RNA, 20 nt, Artificial Sequence
  GATA2 Guide RNA
agguggcgccggagcagccg

SEQ ID NO: 31178 - RNA, 20 nt, Artificial Sequence
  GATA2 Guide RNA
auccagcgcggcugcuccgg

SEQ ID NO: 31179 - RNA, 20 nt, Artificial Sequence
  GATA2 Guide RNA
auggagguggcgccggagca

SEQ ID NO: 31180 - RNA, 20 nt, Artificial Sequence
  GATA2 Guide RNA
cauccagcgcggcugcuccg

SEQ ID NO: 31181 - RNA, 20 nt, Artificial Sequence
  GATA2 Guide RNA
cauggagguggcgccggagc

SEQ ID NO: 31182 - RNA, 20 nt, Artificial Sequence
  GATA2 Guide RNA
ccauccagcgcggcugcucc

SEQ ID NO: 31183 - RNA, 20 nt, Artificial Sequence
  GATA2 Guide RNA
ccauggagguggcgccggag

SEQ ID NO: 31184 - RNA, 20 nt, Artificial Sequence
  GATA2 Guide RNA
ccggagcagccgcgcuggau

SEQ ID NO: 31185 - RNA, 20 nt, Artificial Sequence
  GATA2 Guide RNA
ccggcgccaccuccauggcc

SEQ ID NO: 31186 - RNA, 20 nt, Artificial Sequence
  GATA2 Guide RNA
cggagcagccgcgcuggaug

SEQ ID NO: 31187 - RNA, 20 nt, Artificial Sequence
  GATA2 Guide RNA
cggcgccaccuccauggccg

SEQ ID NO: 31188 - RNA, 20 nt, Artificial Sequence
  GATA2 Guide RNA
cggcugcuccggcgccaccu

SEQ ID NO: 31189 - RNA, 20 nt, Artificial Sequence
  GATA2 Guide RNA
cuccggcgccaccuccaugg

SEQ ID NO: 31190 - RNA, 20 nt, Artificial Sequence
  GATA2 Guide RNA
cugcuccggcgccaccucca

SEQ ID NO: 31191 - RNA, 20 nt, Artificial Sequence
  GATA2 Guide RNA
gagguggcgccggagcagcc

SEQ ID NO: 31192 - RNA, 20 nt, Artificial Sequence
  GATA2 Guide RNA
gccauggagguggcgccgga

SEQ ID NO: 31193 - RNA, 20 nt, Artificial Sequence
  GATA2 Guide RNA
gccggagcagccgcgcugga

SEQ ID NO: 31194 - RNA, 20 nt, Artificial Sequence
  GATA2 Guide RNA
gcuccggcgccaccuccaug

SEQ ID NO: 31195 - RNA, 20 nt, Artificial Sequence
  GATA2 Guide RNA
gcugcuccggcgccaccucc

SEQ ID NO: 31196 - RNA, 20 nt, Artificial Sequence
  GATA2 Guide RNA
ggagguggcgccggagcagc

SEQ ID NO: 31197 - RNA, 20 nt, Artificial Sequence
  GATA2 Guide RNA
ggccauggagguggcgccgg

SEQ ID NO: 31198 - RNA, 20 nt, Artificial Sequence
  GATA2 Guide RNA
ggcugcuccggcgccaccuc

SEQ ID NO: 31199 - RNA, 20 nt, Artificial Sequence
  GATA2 Guide RNA
uccagcgcggcugcuccggc

SEQ ID NO: 31200 - RNA, 20 nt, Artificial Sequence
  GATA2 Guide RNA
uccggcgccaccuccauggc

SEQ ID NO: 31201 - RNA, 20 nt, Artificial Sequence
  GATA2 Guide RNA
ugcuccggcgccaccuccau

SEQ ID NO: 31202 - RNA, 20 nt, Artificial Sequence
  GATA2 Guide RNA
uggagguggcgccggagcag

SEQ ID NO: 31203 - RNA, 21 nt, Artificial Sequence
  GATA2 Guide RNA
auccagcgcggcugcuccggc

SEQ ID NO: 31204 - RNA, 21 nt, Artificial Sequence
  GATA2 Guide RNA
auggagguggcgccggagcag

SEQ ID NO: 31205 - RNA, 21 nt, Artificial Sequence
  GATA2 Guide RNA
cauccagcgcggcugcuccgg

SEQ ID NO: 31206 - RNA, 21 nt, Artificial Sequence
  GATA2 Guide RNA
cauggagguggcgccggagca

SEQ ID NO: 31207 - RNA, 21 nt, Artificial Sequence
  GATA2 Guide RNA
ccauccagcgcggcugcuccg

SEQ ID NO: 31208 - RNA, 21 nt, Artificial Sequence
  GATA2 Guide RNA
ccauggagguggcgccggagc

SEQ ID NO: 31209 - RNA, 21 nt, Artificial Sequence
  GATA2 Guide RNA
ccggagcagccgcgcuggaug

SEQ ID NO: 31210 - RNA, 21 nt, Artificial Sequence
  GATA2 Guide RNA
cggagcagccgcgcuggaugg

SEQ ID NO: 31211 - RNA, 21 nt, Artificial Sequence
  GATA2 Guide RNA
cuccggcgccaccuccauggc

SEQ ID NO: 31212 - RNA, 21 nt, Artificial Sequence
  GATA2 Guide RNA
cugcuccggcgccaccuccau

SEQ ID NO: 31213 - RNA, 21 nt, Artificial Sequence
  GATA2 Guide RNA
gccauccagcgcggcugcucc

SEQ ID NO: 31214 - RNA, 21 nt, Artificial Sequence
  GATA2 Guide RNA
gccauggagguggcgccggag

SEQ ID NO: 31215 - RNA, 21 nt, Artificial Sequence
  GATA2 Guide RNA
gccggagcagccgcgcuggau

SEQ ID NO: 31216 - RNA, 21 nt, Artificial Sequence
  GATA2 Guide RNA
gcuccggcgccaccuccaugg

SEQ ID NO: 31217 - RNA, 21 nt, Artificial Sequence
  GATA2 Guide RNA
gcugcuccggcgccaccucca

SEQ ID NO: 31218 - RNA, 21 nt, Artificial Sequence
  GATA2 Guide RNA
ggccauggagguggcgccgga

SEQ ID NO: 31219 - RNA, 21 nt, Artificial Sequence
  GATA2 Guide RNA
uccggcgccaccuccauggcc

SEQ ID NO: 31220 - RNA, 21 nt, Artificial Sequence
  GATA2 Guide RNA
ugcuccggcgccaccuccaug

SEQ ID NO: 31221 - RNA, 21 nt, Artificial Sequence
  GATA2 Guide RNA
uggagguggcgccggagcagc

SEQ ID NO: 31222 - RNA, 22 nt, Artificial Sequence
  GATA2 Guide RNA
auccagcgcggcugcuccggcg

SEQ ID NO: 31223 - RNA, 22 nt, Artificial Sequence
  GATA2 Guide RNA
auggagguggcgccggagcagc

SEQ ID NO: 31224 - RNA, 22 nt, Artificial Sequence
  GATA2 Guide RNA
cauccagcgcggcugcuccggc

SEQ ID NO: 31225 - RNA, 22 nt, Artificial Sequence
  GATA2 Guide RNA
cauggagguggcgccggagcag

SEQ ID NO: 31226 - RNA, 22 nt, Artificial Sequence
  GATA2 Guide RNA
ccauccagcgcggcugcuccgg

SEQ ID NO: 31227 - RNA, 22 nt, Artificial Sequence
  GATA2 Guide RNA
ccauggagguggcgccggagca

SEQ ID NO: 31228 - RNA, 22 nt, Artificial Sequence
  GATA2 Guide RNA
ccggagcagccgcgcuggaugg

SEQ ID NO: 31229 - RNA, 22 nt, Artificial Sequence
  GATA2 Guide RNA
cgccauccagcgcggcugcucc

SEQ ID NO: 31230 - RNA, 22 nt, Artificial Sequence
  GATA2 Guide RNA
cgccggagcagccgcgcuggau

SEQ ID NO: 31231 - RNA, 22 nt, Artificial Sequence
  GATA2 Guide RNA
cggagcagccgcgcuggauggc

SEQ ID NO: 31232 - RNA, 22 nt, Artificial Sequence
  GATA2 Guide RNA
cggccauggagguggcgccgga

SEQ ID NO: 31233 - RNA, 22 nt, Artificial Sequence
  GATA2 Guide RNA
cuccggcgccaccuccauggcc

SEQ ID NO: 31234 - RNA, 22 nt, Artificial Sequence
  GATA2 Guide RNA
cugcuccggcgccaccuccaug

SEQ ID NO: 31235 - RNA, 22 nt, Artificial Sequence
  GATA2 Guide RNA
gccauccagcgcggcugcuccg

SEQ ID NO: 31236 - RNA, 22 nt, Artificial Sequence
  GATA2 Guide RNA
gccauggagguggcgccggagc

SEQ ID NO: 31237 - RNA, 22 nt, Artificial Sequence
  GATA2 Guide RNA
gccggagcagccgcgcuggaug

SEQ ID NO: 31238 - RNA, 22 nt, Artificial Sequence
  GATA2 Guide RNA
gcuccggcgccaccuccauggc

SEQ ID NO: 31239 - RNA, 22 nt, Artificial Sequence
  GATA2 Guide RNA
gcugcuccggcgccaccuccau

SEQ ID NO: 31240 - RNA, 22 nt, Artificial Sequence
  GATA2 Guide RNA
ggccauggagguggcgccggag

SEQ ID NO: 31241 - RNA, 22 nt, Artificial Sequence
  GATA2 Guide RNA
ggcugcuccggcgccaccucca

SEQ ID NO: 31242 - RNA, 22 nt, Artificial Sequence
  GATA2 Guide RNA
uccggcgccaccuccauggccg

SEQ ID NO: 31243 - RNA, 22 nt, Artificial Sequence
  GATA2 Guide RNA
ugcuccggcgccaccuccaugg

SEQ ID NO: 31244 - RNA, 22 nt, Artificial Sequence
  GATA2 Guide RNA
uggagguggcgccggagcagcc

SEQ ID NO: 31245 - RNA, 20 nt, Artificial Sequence
  GATA2 Guide RNA
aaagcaggcaccagcucacc

SEQ ID NO: 31246 - RNA, 20 nt, Artificial Sequence
  GATA2 Guide RNA
aaagccagaguggccacggc

SEQ ID NO: 31247 - RNA, 20 nt, Artificial Sequence
  GATA2 Guide RNA
aaauagccgaacuccaggcu

SEQ ID NO: 31248 - RNA, 20 nt, Artificial Sequence
  GATA2 Guide RNA
aaaucugcccccagagcccu

SEQ ID NO: 31249 - RNA, 20 nt, Artificial Sequence
  GATA2 Guide RNA
aacaaggacuuggagacuug

SEQ ID NO: 31250 - RNA, 20 nt, Artificial Sequence
  GATA2 Guide RNA
aaccggaggacuugggacag

SEQ ID NO: 31251 - RNA, 20 nt, Artificial Sequence
  GATA2 Guide RNA
aacuccaggcugggcugagc

SEQ ID NO: 31252 - RNA, 20 nt, Artificial Sequence
  GATA2 Guide RNA
aagaaccggaggacuuggga

SEQ ID NO: 31253 - RNA, 20 nt, Artificial Sequence
  GATA2 Guide RNA
aagagggugcaggcugaggu

SEQ ID NO: 31254 - RNA, 20 nt, Artificial Sequence
  GATA2 Guide RNA
aagcaggcaccagcucaccc

SEQ ID NO: 31255 - RNA, 20 nt, Artificial Sequence
  GATA2 Guide RNA
aagccagaggagaagagggu

SEQ ID NO: 31256 - RNA, 20 nt, Artificial Sequence
  GATA2 Guide RNA
aagccagaguggccacggcc

SEQ ID NO: 31257 - RNA, 20 nt, Artificial Sequence
  GATA2 Guide RNA
aaggaaaaaggauuaggcaa

SEQ ID NO: 31258 - RNA, 20 nt, Artificial Sequence
  GATA2 Guide RNA
aaggacuuggagacuuggug

SEQ ID NO: 31259 - RNA, 20 nt, Artificial Sequence
  GATA2 Guide RNA
aaguccuccgguucuuccuc

SEQ ID NO: 31260 - RNA, 20 nt, Artificial Sequence
  GATA2 Guide RNA
aaguccuuguuagaaacaag

SEQ ID NO: 31261 - RNA, 20 nt, Artificial Sequence
  GATA2 Guide RNA
aagucuccaaguccuuguua

SEQ ID NO: 31262 - RNA, 20 nt, Artificial Sequence
  GATA2 Guide RNA
aaguggacccgccaaucccg

SEQ ID NO: 31263 - RNA, 20 nt, Artificial Sequence
  GATA2 Guide RNA
aauagccgaacuccaggcug

SEQ ID NO: 31264 - RNA, 20 nt, Artificial Sequence
  GATA2 Guide RNA
aaucccgaggaagaaccgga

SEQ ID NO: 31265 - RNA, 20 nt, Artificial Sequence
  GATA2 Guide RNA
aaucugcccccagagcccug

SEQ ID NO: 31266 - RNA, 20 nt, Artificial Sequence
  GATA2 Guide RNA
acaaaucugcccccagagcc

SEQ ID NO: 31267 - RNA, 20 nt, Artificial Sequence
  GATA2 Guide RNA
acaaggacuuggagacuugg

SEQ ID NO: 31268 - RNA, 20 nt, Artificial Sequence
  GATA2 Guide RNA
acagcucagaccaccaaguc

SEQ ID NO: 31269 - RNA, 20 nt, Artificial Sequence
  GATA2 Guide RNA
accaagucuccaaguccuug

SEQ ID NO: 31270 - RNA, 20 nt, Artificial Sequence
  GATA2 Guide RNA
accaccaagucuccaagucc

SEQ ID NO: 31271 - RNA, 20 nt, Artificial Sequence
  GATA2 Guide RNA
accagcucacccucccuggg

SEQ ID NO: 31272 - RNA, 20 nt, Artificial Sequence
  GATA2 Guide RNA
acccgccaaucccgaggaag

SEQ ID NO: 31273 - RNA, 20 nt, Artificial Sequence
  GATA2 Guide RNA
acccucccugggccguggcc

SEQ ID NO: 31274 - RNA, 20 nt, Artificial Sequence
  GATA2 Guide RNA
acccucuucuccucuggcuu

SEQ ID NO: 31275 - RNA, 20 nt, Artificial Sequence
  GATA2 Guide RNA
accggaggacuugggacagc

SEQ ID NO: 31276 - RNA, 20 nt, Artificial Sequence
  GATA2 Guide RNA
accucagccugcacccucuu

SEQ ID NO: 31277 - RNA, 20 nt, Artificial Sequence
  GATA2 Guide RNA
acggcccagggagggugagc

SEQ ID NO: 31278 - RNA, 20 nt, Artificial Sequence
  GATA2 Guide RNA
acgggccaggcccuggaggg

SEQ ID NO: 31279 - RNA, 20 nt, Artificial Sequence
  GATA2 Guide RNA
acuccaggcugggcugagcc

SEQ ID NO: 31280 - RNA, 20 nt, Artificial Sequence
  GATA2 Guide RNA
acucuggcuuuggcucagcc

SEQ ID NO: 31281 - RNA, 20 nt, Artificial Sequence
  GATA2 Guide RNA
acuugccagggcucuggggg

SEQ ID NO: 31282 - RNA, 20 nt, Artificial Sequence
  GATA2 Guide RNA
acuuggagacuugguggucu

SEQ ID NO: 31283 - RNA, 20 nt, Artificial Sequence
  GATA2 Guide RNA
acuugggacagcucagacca

SEQ ID NO: 31284 - RNA, 20 nt, Artificial Sequence
  GATA2 Guide RNA
acuugguggucugagcuguc

SEQ ID NO: 31285 - RNA, 20 nt, Artificial Sequence
  GATA2 Guide RNA
agaaccggaggacuugggac

SEQ ID NO: 31286 - RNA, 20 nt, Artificial Sequence
  GATA2 Guide RNA
agaagagggugcaggcugag

SEQ ID NO: 31287 - RNA, 20 nt, Artificial Sequence
  GATA2 Guide RNA
agaaggaaaaaggauuaggc

SEQ ID NO: 31288 - RNA, 20 nt, Artificial Sequence
  GATA2 Guide RNA
agaccaccaagucuccaagu

SEQ ID NO: 31289 - RNA, 20 nt, Artificial Sequence
  GATA2 Guide RNA
agacuugguggucugagcug

SEQ ID NO: 31290 - RNA, 20 nt, Artificial Sequence
  GATA2 Guide RNA
agagagggaagccagaggag

SEQ ID NO: 31291 - RNA, 20 nt, Artificial Sequence
  GATA2 Guide RNA
agaggagaagagggugcagg

SEQ ID NO: 31292 - RNA, 20 nt, Artificial Sequence
  GATA2 Guide RNA
agagggaagccagaggagaa

SEQ ID NO: 31293 - RNA, 20 nt, Artificial Sequence
  GATA2 Guide RNA
agagggugcaggcugagguc

SEQ ID NO: 31294 - RNA, 20 nt, Artificial Sequence
  GATA2 Guide RNA
agaguggccacggcccaggg

SEQ ID NO: 31295 - RNA, 20 nt, Artificial Sequence
  GATA2 Guide RNA
agauuuguggggaccucagc

SEQ ID NO: 31296 - RNA, 20 nt, Artificial Sequence
  GATA2 Guide RNA
agcaggcaccagcucacccu

SEQ ID NO: 31297 - RNA, 20 nt, Artificial Sequence
  GATA2 Guide RNA
agccaaagccagaguggcca

SEQ ID NO: 31298 - RNA, 20 nt, Artificial Sequence
  GATA2 Guide RNA
agccagaggagaagagggug

SEQ ID NO: 31299 - RNA, 20 nt, Artificial Sequence
  GATA2 Guide RNA
agccagaguggccacggccc

SEQ ID NO: 31300 - RNA, 20 nt, Artificial Sequence
  GATA2 Guide RNA
agcccagccuggaguucggc

SEQ ID NO: 31301 - RNA, 20 nt, Artificial Sequence
  GATA2 Guide RNA
agcccuggcaaguggacccg

SEQ ID NO: 31302 - RNA, 20 nt, Artificial Sequence
  GATA2 Guide RNA
agccgaacuccaggcugggc

SEQ ID NO: 31303 - RNA, 20 nt, Artificial Sequence
  GATA2 Guide RNA
agccugcacccucuucuccu

SEQ ID NO: 31304 - RNA, 20 nt, Artificial Sequence
  GATA2 Guide RNA
agccuggaguucggcuauuu

SEQ ID NO: 31305 - RNA, 20 nt, Artificial Sequence
  GATA2 Guide RNA
agcucacccucccugggccg

SEQ ID NO: 31306 - RNA, 20 nt, Artificial Sequence
  GATA2 Guide RNA
agcucagaccaccaagucuc

SEQ ID NO: 31307 - RNA, 20 nt, Artificial Sequence
  GATA2 Guide RNA
agcuggugccugcuuugacg

SEQ ID NO: 31308 - RNA, 20 nt, Artificial Sequence
  GATA2 Guide RNA
agcugucccaaguccuccgg

SEQ ID NO: 31309 - RNA, 20 nt, Artificial Sequence
  GATA2 Guide RNA
aggaaaaaggauuaggcaaa

SEQ ID NO: 31310 - RNA, 20 nt, Artificial Sequence
  GATA2 Guide RNA
aggaagaaccggaggacuug

SEQ ID NO: 31311 - RNA, 20 nt, Artificial Sequence
  GATA2 Guide RNA
aggacuuggagacuuggugg

SEQ ID NO: 31312 - RNA, 20 nt, Artificial Sequence
  GATA2 Guide RNA
aggacuugggacagcucaga

SEQ ID NO: 31313 - RNA, 20 nt, Artificial Sequence
  GATA2 Guide RNA
aggagaagagggugcaggcu

SEQ ID NO: 31314 - RNA, 20 nt, Artificial Sequence
  GATA2 Guide RNA
aggcaccagcucacccuccc

SEQ ID NO: 31315 - RNA, 20 nt, Artificial Sequence
  GATA2 Guide RNA
aggcugagguccccacaaau

SEQ ID NO: 31316 - RNA, 20 nt, Artificial Sequence
  GATA2 Guide RNA
aggcugggcugagccaaagc

SEQ ID NO: 31317 - RNA, 20 nt, Artificial Sequence
  GATA2 Guide RNA
agggaagccagaggagaaga

SEQ ID NO: 31318 - RNA, 20 nt, Artificial Sequence
  GATA2 Guide RNA
agggagggugagcuggugcc

SEQ ID NO: 31319 - RNA, 20 nt, Artificial Sequence
  GATA2 Guide RNA
agggcucugggggcagauuu

SEQ ID NO: 31320 - RNA, 20 nt, Artificial Sequence
  GATA2 Guide RNA
agggugagcuggugccugcu

SEQ ID NO: 31321 - RNA, 20 nt, Artificial Sequence
  GATA2 Guide RNA
agggugcaggcugagguccc

SEQ ID NO: 31322 - RNA, 20 nt, Artificial Sequence
  GATA2 Guide RNA
agguccccacaaaucugccc

SEQ ID NO: 31323 - RNA, 20 nt, Artificial Sequence
  GATA2 Guide RNA
aguccuccgguucuuccucg

SEQ ID NO: 31324 - RNA, 20 nt, Artificial Sequence
  GATA2 Guide RNA
aguccuuguuagaaacaaga

SEQ ID NO: 31325 - RNA, 20 nt, Artificial Sequence
  GATA2 Guide RNA
agucuccaaguccuuguuag

SEQ ID NO: 31326 - RNA, 20 nt, Artificial Sequence
  GATA2 Guide RNA
aguggacccgccaaucccga

SEQ ID NO: 31327 - RNA, 20 nt, Artificial Sequence
  GATA2 Guide RNA
aguggccacggcccagggag

SEQ ID NO: 31328 - RNA, 20 nt, Artificial Sequence
  GATA2 Guide RNA
aguucggcuauuucagagag

SEQ ID NO: 31329 - RNA, 20 nt, Artificial Sequence
  GATA2 Guide RNA
auagccgaacuccaggcugg

SEQ ID NO: 31330 - RNA, 20 nt, Artificial Sequence
  GATA2 Guide RNA
aucccgaggaagaaccggag

SEQ ID NO: 31331 - RNA, 20 nt, Artificial Sequence
  GATA2 Guide RNA
aucugcccccagagcccugg

SEQ ID NO: 31332 - RNA, 20 nt, Artificial Sequence
  GATA2 Guide RNA
auuggcggguccacuugcca

SEQ ID NO: 31333 - RNA, 20 nt, Artificial Sequence
  GATA2 Guide RNA
auuucagagagggaagccag

SEQ ID NO: 31334 - RNA, 20 nt, Artificial Sequence
  GATA2 Guide RNA
auuuguggggaccucagccu

SEQ ID NO: 31335 - RNA, 20 nt, Artificial Sequence
  GATA2 Guide RNA
auuuugcucuuguuucuaac

SEQ ID NO: 31336 - RNA, 20 nt, Artificial Sequence
  GATA2 Guide RNA
caaagcaggcaccagcucac

SEQ ID NO: 31337 - RNA, 20 nt, Artificial Sequence
  GATA2 Guide RNA
caaagccagaguggccacgg

SEQ ID NO: 31338 - RNA, 20 nt, Artificial Sequence
  GATA2 Guide RNA
caaaucugcccccagagccc

SEQ ID NO: 31339 - RNA, 20 nt, Artificial Sequence
  GATA2 Guide RNA
caaggacuuggagacuuggu

SEQ ID NO: 31340 - RNA, 20 nt, Artificial Sequence
  GATA2 Guide RNA
caaguccuccgguucuuccu

SEQ ID NO: 31341 - RNA, 20 nt, Artificial Sequence
  GATA2 Guide RNA
caaguccuuguuagaaacaa

SEQ ID NO: 31342 - RNA, 20 nt, Artificial Sequence
  GATA2 Guide RNA
caagucuccaaguccuuguu

SEQ ID NO: 31343 - RNA, 20 nt, Artificial Sequence
  GATA2 Guide RNA
caaguggacccgccaauccc

SEQ ID NO: 31344 - RNA, 20 nt, Artificial Sequence
  GATA2 Guide RNA
caaucccgaggaagaaccgg

SEQ ID NO: 31345 - RNA, 20 nt, Artificial Sequence
  GATA2 Guide RNA
cacaaaucugcccccagagc

SEQ ID NO: 31346 - RNA, 20 nt, Artificial Sequence
  GATA2 Guide RNA
caccaagucuccaaguccuu

SEQ ID NO: 31347 - RNA, 20 nt, Artificial Sequence
  GATA2 Guide RNA
caccagcucacccucccugg

SEQ ID NO: 31348 - RNA, 20 nt, Artificial Sequence
  GATA2 Guide RNA
cacccucccugggccguggc

SEQ ID NO: 31349 - RNA, 20 nt, Artificial Sequence
  GATA2 Guide RNA
cacccucuucuccucuggcu

SEQ ID NO: 31350 - RNA, 20 nt, Artificial Sequence
  GATA2 Guide RNA
cacggcccagggagggugag

SEQ ID NO: 31351 - RNA, 20 nt, Artificial Sequence
  GATA2 Guide RNA
cacucuggcuuuggcucagc

SEQ ID NO: 31352 - RNA, 20 nt, Artificial Sequence
  GATA2 Guide RNA
cacuugccagggcucugggg

SEQ ID NO: 31353 - RNA, 20 nt, Artificial Sequence
  GATA2 Guide RNA
cagaccaccaagucuccaag

SEQ ID NO: 31354 - RNA, 20 nt, Artificial Sequence
  GATA2 Guide RNA
cagagagggaagccagagga

SEQ ID NO: 31355 - RNA, 20 nt, Artificial Sequence
  GATA2 Guide RNA
cagaggagaagagggugcag

SEQ ID NO: 31356 - RNA, 20 nt, Artificial Sequence
  GATA2 Guide RNA
cagaguggccacggcccagg

SEQ ID NO: 31357 - RNA, 20 nt, Artificial Sequence
  GATA2 Guide RNA
cagauuuguggggaccucag

SEQ ID NO: 31358 - RNA, 20 nt, Artificial Sequence
  GATA2 Guide RNA
cagcccagccuggaguucgg

SEQ ID NO: 31359 - RNA, 20 nt, Artificial Sequence
  GATA2 Guide RNA
cagccugcacccucuucucc

SEQ ID NO: 31360 - RNA, 20 nt, Artificial Sequence
  GATA2 Guide RNA
cagccuggaguucggcuauu

SEQ ID NO: 31361 - RNA, 20 nt, Artificial Sequence
  GATA2 Guide RNA
cagcucacccucccugggcc

SEQ ID NO: 31362 - RNA, 20 nt, Artificial Sequence
  GATA2 Guide RNA
cagcucagaccaccaagucu

SEQ ID NO: 31363 - RNA, 20 nt, Artificial Sequence
  GATA2 Guide RNA
caggcaccagcucacccucc

SEQ ID NO: 31364 - RNA, 20 nt, Artificial Sequence
  GATA2 Guide RNA
caggcugagguccccacaaa

SEQ ID NO: 31365 - RNA, 20 nt, Artificial Sequence
  GATA2 Guide RNA
caggcugggcugagccaaag

SEQ ID NO: 31366 - RNA, 20 nt, Artificial Sequence
  GATA2 Guide RNA
cagggagggugagcuggugc

SEQ ID NO: 31367 - RNA, 20 nt, Artificial Sequence
  GATA2 Guide RNA
cagggccuggcccgucaaag

SEQ ID NO: 31368 - RNA, 20 nt, Artificial Sequence
  GATA2 Guide RNA
cagggcucugggggcagauu

SEQ ID NO: 31369 - RNA, 20 nt, Artificial Sequence
  GATA2 Guide RNA
ccaaagccagaguggccacg

SEQ ID NO: 31370 - RNA, 20 nt, Artificial Sequence
  GATA2 Guide RNA
ccaaguccuccgguucuucc

SEQ ID NO: 31371 - RNA, 20 nt, Artificial Sequence
  GATA2 Guide RNA
ccaaguccuuguuagaaaca

SEQ ID NO: 31372 - RNA, 20 nt, Artificial Sequence
  GATA2 Guide RNA
ccaagucuccaaguccuugu

SEQ ID NO: 31373 - RNA, 20 nt, Artificial Sequence
  GATA2 Guide RNA
ccaaucccgaggaagaaccg

SEQ ID NO: 31374 - RNA, 20 nt, Artificial Sequence
  GATA2 Guide RNA
ccacaaaucugcccccagag

SEQ ID NO: 31375 - RNA, 20 nt, Artificial Sequence
  GATA2 Guide RNA
ccaccaagucuccaaguccu

SEQ ID NO: 31376 - RNA, 20 nt, Artificial Sequence
  GATA2 Guide RNA
ccacggcccagggaggguga

SEQ ID NO: 31377 - RNA, 20 nt, Artificial Sequence
  GATA2 Guide RNA
ccacucuggcuuuggcucag

SEQ ID NO: 31378 - RNA, 20 nt, Artificial Sequence
  GATA2 Guide RNA
ccacuugccagggcucuggg

SEQ ID NO: 31379 - RNA, 20 nt, Artificial Sequence
  GATA2 Guide RNA
ccagaggagaagagggugca

SEQ ID NO: 31380 - RNA, 20 nt, Artificial Sequence
  GATA2 Guide RNA
ccagaguggccacggcccag

SEQ ID NO: 31381 - RNA, 20 nt, Artificial Sequence
  GATA2 Guide RNA
ccagccuggaguucggcuau

SEQ ID NO: 31382 - RNA, 20 nt, Artificial Sequence
  GATA2 Guide RNA
ccagcucacccucccugggc

SEQ ID NO: 31383 - RNA, 20 nt, Artificial Sequence
  GATA2 Guide RNA
ccaggcugggcugagccaaa

SEQ ID NO: 31384 - RNA, 20 nt, Artificial Sequence
  GATA2 Guide RNA
ccagggccuggcccgucaaa

SEQ ID NO: 31385 - RNA, 20 nt, Artificial Sequence
  GATA2 Guide RNA
ccagggcucugggggcagau

SEQ ID NO: 31386 - RNA, 20 nt, Artificial Sequence
  GATA2 Guide RNA
cccaaguccuccgguucuuc

SEQ ID NO: 31387 - RNA, 20 nt, Artificial Sequence
  GATA2 Guide RNA
cccacaaaucugcccccaga

SEQ ID NO: 31388 - RNA, 20 nt, Artificial Sequence
  GATA2 Guide RNA
cccagagcccuggcaagugg

SEQ ID NO: 31389 - RNA, 20 nt, Artificial Sequence
  GATA2 Guide RNA
cccagccuggaguucggcua

SEQ ID NO: 31390 - RNA, 20 nt, Artificial Sequence
  GATA2 Guide RNA
ccccacaaaucugcccccag

SEQ ID NO: 31391 - RNA, 20 nt, Artificial Sequence
  GATA2 Guide RNA
ccccagagcccuggcaagug

SEQ ID NO: 31392 - RNA, 20 nt, Artificial Sequence
  GATA2 Guide RNA
cccccagagcccuggcaagu

SEQ ID NO: 31393 - RNA, 20 nt, Artificial Sequence
  GATA2 Guide RNA
cccgaggaagaaccggagga

SEQ ID NO: 31394 - RNA, 20 nt, Artificial Sequence
  GATA2 Guide RNA
cccgccaaucccgaggaaga

SEQ ID NO: 31395 - RNA, 20 nt, Artificial Sequence
  GATA2 Guide RNA
cccgucaaagcaggcaccag

SEQ ID NO: 31396 - RNA, 20 nt, Artificial Sequence
  GATA2 Guide RNA
cccuccagggccuggcccgu

SEQ ID NO: 31397 - RNA, 20 nt, Artificial Sequence
  GATA2 Guide RNA
cccucccugggccguggcca

SEQ ID NO: 31398 - RNA, 20 nt, Artificial Sequence
  GATA2 Guide RNA
cccucucugaaauagccgaa

SEQ ID NO: 31399 - RNA, 20 nt, Artificial Sequence
  GATA2 Guide RNA
cccucuucuccucuggcuuc

SEQ ID NO: 31400 - RNA, 20 nt, Artificial Sequence
  GATA2 Guide RNA
cccuggcaaguggacccgcc

SEQ ID NO: 31401 - RNA, 20 nt, Artificial Sequence
  GATA2 Guide RNA
cccugggccguggccacucu

SEQ ID NO: 31402 - RNA, 20 nt, Artificial Sequence
  GATA2 Guide RNA
ccgaacuccaggcugggcug

SEQ ID NO: 31403 - RNA, 20 nt, Artificial Sequence
  GATA2 Guide RNA
ccgaggaagaaccggaggac

SEQ ID NO: 31404 - RNA, 20 nt, Artificial Sequence
  GATA2 Guide RNA
ccgccaaucccgaggaagaa

SEQ ID NO: 31405 - RNA, 20 nt, Artificial Sequence
  GATA2 Guide RNA
ccggaggacuugggacagcu

SEQ ID NO: 31406 - RNA, 20 nt, Artificial Sequence
  GATA2 Guide RNA
ccgucaaagcaggcaccagc

SEQ ID NO: 31407 - RNA, 20 nt, Artificial Sequence
  GATA2 Guide RNA
ccguggccacucuggcuuug

SEQ ID NO: 31408 - RNA, 20 nt, Artificial Sequence
  GATA2 Guide RNA
ccucagccugcacccucuuc

SEQ ID NO: 31409 - RNA, 20 nt, Artificial Sequence
  GATA2 Guide RNA
ccuccagggccuggcccguc

SEQ ID NO: 31410 - RNA, 20 nt, Artificial Sequence
  GATA2 Guide RNA
ccucccugggccguggccac

SEQ ID NO: 31411 - RNA, 20 nt, Artificial Sequence
  GATA2 Guide RNA
ccuccgguucuuccucggga

SEQ ID NO: 31412 - RNA, 20 nt, Artificial Sequence
  GATA2 Guide RNA
ccucgggauuggcgggucca

SEQ ID NO: 31413 - RNA, 20 nt, Artificial Sequence
  GATA2 Guide RNA
ccucucugaaauagccgaac

SEQ ID NO: 31414 - RNA, 20 nt, Artificial Sequence
  GATA2 Guide RNA
ccucuggcuucccucucuga

SEQ ID NO: 31415 - RNA, 20 nt, Artificial Sequence
  GATA2 Guide RNA
ccucuucuccucuggcuucc

SEQ ID NO: 31416 - RNA, 20 nt, Artificial Sequence
  GATA2 Guide RNA
ccugcacccucuucuccucu

SEQ ID NO: 31417 - RNA, 20 nt, Artificial Sequence
  GATA2 Guide RNA
ccugcuuugacgggccaggc

SEQ ID NO: 31418 - RNA, 20 nt, Artificial Sequence
  GATA2 Guide RNA
ccuggaguucggcuauuuca

SEQ ID NO: 31419 - RNA, 20 nt, Artificial Sequence
  GATA2 Guide RNA
ccuggcaaguggacccgcca

SEQ ID NO: 31420 - RNA, 20 nt, Artificial Sequence
  GATA2 Guide RNA
ccuggcccgucaaagcaggc

SEQ ID NO: 31421 - RNA, 20 nt, Artificial Sequence
  GATA2 Guide RNA
ccugggccguggccacucug

SEQ ID NO: 31422 - RNA, 20 nt, Artificial Sequence
  GATA2 Guide RNA
ccuuguuagaaacaagagca

SEQ ID NO: 31423 - RNA, 20 nt, Artificial Sequence
  GATA2 Guide RNA
cgaacuccaggcugggcuga

SEQ ID NO: 31424 - RNA, 20 nt, Artificial Sequence
  GATA2 Guide RNA
cgaggaagaaccggaggacu

SEQ ID NO: 31425 - RNA, 20 nt, Artificial Sequence
  GATA2 Guide RNA
cgccaaucccgaggaagaac

SEQ ID NO: 31426 - RNA, 20 nt, Artificial Sequence
  GATA2 Guide RNA
cggaggacuugggacagcuc

SEQ ID NO: 31427 - RNA, 20 nt, Artificial Sequence
  GATA2 Guide RNA
cggcccagggagggugagcu

SEQ ID NO: 31428 - RNA, 20 nt, Artificial Sequence
  GATA2 Guide RNA
cggcuauuucagagagggaa

SEQ ID NO: 31429 - RNA, 20 nt, Artificial Sequence
  GATA2 Guide RNA
cgggauuggcggguccacuu

SEQ ID NO: 31430 - RNA, 20 nt, Artificial Sequence
  GATA2 Guide RNA
cggguccacuugccagggcu

SEQ ID NO: 31431 - RNA, 20 nt, Artificial Sequence
  GATA2 Guide RNA
cgucaaagcaggcaccagcu

SEQ ID NO: 31432 - RNA, 20 nt, Artificial Sequence
  GATA2 Guide RNA
cguggccacucuggcuuugg

SEQ ID NO: 31433 - RNA, 20 nt, Artificial Sequence
  GATA2 Guide RNA
cuaacaaggacuuggagacu

SEQ ID NO: 31434 - RNA, 20 nt, Artificial Sequence
  GATA2 Guide RNA
cuauuucagagagggaagcc

SEQ ID NO: 31435 - RNA, 20 nt, Artificial Sequence
  GATA2 Guide RNA
cucacccucccugggccgug

SEQ ID NO: 31436 - RNA, 20 nt, Artificial Sequence
  GATA2 Guide RNA
cucagaccaccaagucucca

SEQ ID NO: 31437 - RNA, 20 nt, Artificial Sequence
  GATA2 Guide RNA
cucagcccagccuggaguuc

SEQ ID NO: 31438 - RNA, 20 nt, Artificial Sequence
  GATA2 Guide RNA
cucagccugcacccucuucu

SEQ ID NO: 31439 - RNA, 20 nt, Artificial Sequence
  GATA2 Guide RNA
cuccaaguccuuguuagaaa

SEQ ID NO: 31440 - RNA, 20 nt, Artificial Sequence
  GATA2 Guide RNA
cuccaggcugggcugagcca

SEQ ID NO: 31441 - RNA, 20 nt, Artificial Sequence
  GATA2 Guide RNA
cuccagggccuggcccguca

SEQ ID NO: 31442 - RNA, 20 nt, Artificial Sequence
  GATA2 Guide RNA
cucccugggccguggccacu

SEQ ID NO: 31443 - RNA, 20 nt, Artificial Sequence
  GATA2 Guide RNA
cuccgguucuuccucgggau

SEQ ID NO: 31444 - RNA, 20 nt, Artificial Sequence
  GATA2 Guide RNA
cuccucuggcuucccucucu

SEQ ID NO: 31445 - RNA, 20 nt, Artificial Sequence
  GATA2 Guide RNA
cucgggauuggcggguccac

SEQ ID NO: 31446 - RNA, 20 nt, Artificial Sequence
  GATA2 Guide RNA
cucucugaaauagccgaacu

SEQ ID NO: 31447 - RNA, 20 nt, Artificial Sequence
  GATA2 Guide RNA
cucugaaauagccgaacucc

SEQ ID NO: 31448 - RNA, 20 nt, Artificial Sequence
  GATA2 Guide RNA
cucugcccuccagggccugg

SEQ ID NO: 31449 - RNA, 20 nt, Artificial Sequence
  GATA2 Guide RNA
cucuggcuucccucucugaa

SEQ ID NO: 31450 - RNA, 20 nt, Artificial Sequence
  GATA2 Guide RNA
cucuggcuuuggcucagccc

SEQ ID NO: 31451 - RNA, 20 nt, Artificial Sequence
  GATA2 Guide RNA
cucugggggcagauuugugg

SEQ ID NO: 31452 - RNA, 20 nt, Artificial Sequence
  GATA2 Guide RNA
cucuucuccucuggcuuccc

SEQ ID NO: 31453 - RNA, 20 nt, Artificial Sequence
  GATA2 Guide RNA
cucuuguuucuaacaaggac

SEQ ID NO: 31454 - RNA, 20 nt, Artificial Sequence
  GATA2 Guide RNA
cugaaauagccgaacuccag

SEQ ID NO: 31455 - RNA, 20 nt, Artificial Sequence
  GATA2 Guide RNA
cugagccaaagccagagugg

SEQ ID NO: 31456 - RNA, 20 nt, Artificial Sequence
  GATA2 Guide RNA
cugagcugucccaaguccuc

SEQ ID NO: 31457 - RNA, 20 nt, Artificial Sequence
  GATA2 Guide RNA
cugagguccccacaaaucug

SEQ ID NO: 31458 - RNA, 20 nt, Artificial Sequence
  GATA2 Guide RNA
cugcacccucuucuccucug

SEQ ID NO: 31459 - RNA, 20 nt, Artificial Sequence
  GATA2 Guide RNA
cugcccccagagcccuggca

SEQ ID NO: 31460 - RNA, 20 nt, Artificial Sequence
  GATA2 Guide RNA
cugcccuccagggccuggcc

SEQ ID NO: 31461 - RNA, 20 nt, Artificial Sequence
  GATA2 Guide RNA
cugcuuugacgggccaggcc

SEQ ID NO: 31462 - RNA, 20 nt, Artificial Sequence
  GATA2 Guide RNA
cuggaguucggcuauuucag

SEQ ID NO: 31463 - RNA, 20 nt, Artificial Sequence
  GATA2 Guide RNA
cuggcaaguggacccgccaa

SEQ ID NO: 31464 - RNA, 20 nt, Artificial Sequence
  GATA2 Guide RNA
cuggcccgucaaagcaggca

SEQ ID NO: 31465 - RNA, 20 nt, Artificial Sequence
  GATA2 Guide RNA
cuggcuucccucucugaaau

SEQ ID NO: 31466 - RNA, 20 nt, Artificial Sequence
  GATA2 Guide RNA
cuggcuuuggcucagcccag

SEQ ID NO: 31467 - RNA, 20 nt, Artificial Sequence
  GATA2 Guide RNA
cugggccguggccacucugg

SEQ ID NO: 31468 - RNA, 20 nt, Artificial Sequence
  GATA2 Guide RNA
cugggcugagccaaagccag

SEQ ID NO: 31469 - RNA, 20 nt, Artificial Sequence
  GATA2 Guide RNA
cugggggcagauuugugggg

SEQ ID NO: 31470 - RNA, 20 nt, Artificial Sequence
  GATA2 Guide RNA
cuggugccugcuuugacggg

SEQ ID NO: 31471 - RNA, 20 nt, Artificial Sequence
  GATA2 Guide RNA
cugucccaaguccuccgguu

SEQ ID NO: 31472 - RNA, 20 nt, Artificial Sequence
  GATA2 Guide RNA
cuucccucucugaaauagcc

SEQ ID NO: 31473 - RNA, 20 nt, Artificial Sequence
  GATA2 Guide RNA
cuuccucgggauuggcgggu

SEQ ID NO: 31474 - RNA, 20 nt, Artificial Sequence
  GATA2 Guide RNA
cuucuccucuggcuucccuc

SEQ ID NO: 31475 - RNA, 20 nt, Artificial Sequence
  GATA2 Guide RNA
cuugccagggcucugggggc

SEQ ID NO: 31476 - RNA, 20 nt, Artificial Sequence
  GATA2 Guide RNA
cuuggagacuugguggucug

SEQ ID NO: 31477 - RNA, 20 nt, Artificial Sequence
  GATA2 Guide RNA
cuugggacagcucagaccac

SEQ ID NO: 31478 - RNA, 20 nt, Artificial Sequence
  GATA2 Guide RNA
cuugguggucugagcugucc

SEQ ID NO: 31479 - RNA, 20 nt, Artificial Sequence
  GATA2 Guide RNA
cuuguuagaaacaagagcaa

SEQ ID NO: 31480 - RNA, 20 nt, Artificial Sequence
  GATA2 Guide RNA
cuuguuucuaacaaggacuu

SEQ ID NO: 31481 - RNA, 20 nt, Artificial Sequence
  GATA2 Guide RNA
cuuugacgggccaggcccug

SEQ ID NO: 31482 - RNA, 20 nt, Artificial Sequence
  GATA2 Guide RNA
cuuuggcucagcccagccug

SEQ ID NO: 31483 - RNA, 20 nt, Artificial Sequence
  GATA2 Guide RNA
gaaaaaggauuaggcaaaaa

SEQ ID NO: 31484 - RNA, 20 nt, Artificial Sequence
  GATA2 Guide RNA
gaaauagccgaacuccaggc

SEQ ID NO: 31485 - RNA, 20 nt, Artificial Sequence
  GATA2 Guide RNA
gaaccggaggacuugggaca

SEQ ID NO: 31486 - RNA, 20 nt, Artificial Sequence
  GATA2 Guide RNA
gaacuccaggcugggcugag

SEQ ID NO: 31487 - RNA, 20 nt, Artificial Sequence
  GATA2 Guide RNA
gaagaaccggaggacuuggg

SEQ ID NO: 31488 - RNA, 20 nt, Artificial Sequence
  GATA2 Guide RNA
gaagagggugcaggcugagg

SEQ ID NO: 31489 - RNA, 20 nt, Artificial Sequence
  GATA2 Guide RNA
gaagccagaggagaagaggg

SEQ ID NO: 31490 - RNA, 20 nt, Artificial Sequence
  GATA2 Guide RNA
gaaggaaaaaggauuaggca

SEQ ID NO: 31491 - RNA, 20 nt, Artificial Sequence
  GATA2 Guide RNA
gacagcucagaccaccaagu

SEQ ID NO: 31492 - RNA, 20 nt, Artificial Sequence
  GATA2 Guide RNA
gaccaccaagucuccaaguc

SEQ ID NO: 31493 - RNA, 20 nt, Artificial Sequence
  GATA2 Guide RNA
gacccgccaaucccgaggaa

SEQ ID NO: 31494 - RNA, 20 nt, Artificial Sequence
  GATA2 Guide RNA
gaccucagccugcacccucu

SEQ ID NO: 31495 - RNA, 20 nt, Artificial Sequence
  GATA2 Guide RNA
gacgggccaggcccuggagg

SEQ ID NO: 31496 - RNA, 20 nt, Artificial Sequence
  GATA2 Guide RNA
gacuuggagacuuggugguc

SEQ ID NO: 31497 - RNA, 20 nt, Artificial Sequence
  GATA2 Guide RNA
gacuugggacagcucagacc

SEQ ID NO: 31498 - RNA, 20 nt, Artificial Sequence
  GATA2 Guide RNA
gacuugguggucugagcugu

SEQ ID NO: 31499 - RNA, 20 nt, Artificial Sequence
  GATA2 Guide RNA
gagaagagggugcaggcuga

SEQ ID NO: 31500 - RNA, 20 nt, Artificial Sequence
  GATA2 Guide RNA
gagacuugguggucugagcu

SEQ ID NO: 31501 - RNA, 20 nt, Artificial Sequence
  GATA2 Guide RNA
gagagggaagccagaggaga

SEQ ID NO: 31502 - RNA, 20 nt, Artificial Sequence
  GATA2 Guide RNA
gagccaaagccagaguggcc

SEQ ID NO: 31503 - RNA, 20 nt, Artificial Sequence
  GATA2 Guide RNA
gagcccuggcaaguggaccc

SEQ ID NO: 31504 - RNA, 20 nt, Artificial Sequence
  GATA2 Guide RNA
gagcuggugccugcuuugac

SEQ ID NO: 31505 - RNA, 20 nt, Artificial Sequence
  GATA2 Guide RNA
gagcugucccaaguccuccg

SEQ ID NO: 31506 - RNA, 20 nt, Artificial Sequence
  GATA2 Guide RNA
gaggaagaaccggaggacuu

SEQ ID NO: 31507 - RNA, 20 nt, Artificial Sequence
  GATA2 Guide RNA
gaggacuugggacagcucag

SEQ ID NO: 31508 - RNA, 20 nt, Artificial Sequence
  GATA2 Guide RNA
gaggagaagagggugcaggc

SEQ ID NO: 31509 - RNA, 20 nt, Artificial Sequence
  GATA2 Guide RNA
gagggaagccagaggagaag

SEQ ID NO: 31510 - RNA, 20 nt, Artificial Sequence
  GATA2 Guide RNA
gagggugagcuggugccugc

SEQ ID NO: 31511 - RNA, 20 nt, Artificial Sequence
  GATA2 Guide RNA
gagggugcaggcugaggucc

SEQ ID NO: 31512 - RNA, 20 nt, Artificial Sequence
  GATA2 Guide RNA
gagguccccacaaaucugcc

SEQ ID NO: 31513 - RNA, 20 nt, Artificial Sequence
  GATA2 Guide RNA
gaguggccacggcccaggga

SEQ ID NO: 31514 - RNA, 20 nt, Artificial Sequence
  GATA2 Guide RNA
gaguucggcuauuucagaga

SEQ ID NO: 31515 - RNA, 20 nt, Artificial Sequence
  GATA2 Guide RNA
gauuggcggguccacuugcc

SEQ ID NO: 31516 - RNA, 20 nt, Artificial Sequence
  GATA2 Guide RNA
gauuuguggggaccucagcc

SEQ ID NO: 31517 - RNA, 20 nt, Artificial Sequence
  GATA2 Guide RNA
gcaaguggacccgccaaucc

SEQ ID NO: 31518 - RNA, 20 nt, Artificial Sequence
  GATA2 Guide RNA
gcaccagcucacccucccug

SEQ ID NO: 31519 - RNA, 20 nt, Artificial Sequence
  GATA2 Guide RNA
gcacccucuucuccucuggc

SEQ ID NO: 31520 - RNA, 20 nt, Artificial Sequence
  GATA2 Guide RNA
gcagauuuguggggaccuca

SEQ ID NO: 31521 - RNA, 20 nt, Artificial Sequence
  GATA2 Guide RNA
gcaggcaccagcucacccuc

SEQ ID NO: 31522 - RNA, 20 nt, Artificial Sequence
  GATA2 Guide RNA
gcaggcugagguccccacaa

SEQ ID NO: 31523 - RNA, 20 nt, Artificial Sequence
  GATA2 Guide RNA
gccaaagccagaguggccac

SEQ ID NO: 31524 - RNA, 20 nt, Artificial Sequence
  GATA2 Guide RNA
gccaaucccgaggaagaacc

SEQ ID NO: 31525 - RNA, 20 nt, Artificial Sequence
  GATA2 Guide RNA
gccacggcccagggagggug

SEQ ID NO: 31526 - RNA, 20 nt, Artificial Sequence
  GATA2 Guide RNA
gccacucuggcuuuggcuca

SEQ ID NO: 31527 - RNA, 20 nt, Artificial Sequence
  GATA2 Guide RNA
gccagaggagaagagggugc

SEQ ID NO: 31528 - RNA, 20 nt, Artificial Sequence
  GATA2 Guide RNA
gccagaguggccacggccca

SEQ ID NO: 31529 - RNA, 20 nt, Artificial Sequence
  GATA2 Guide RNA
gccaggcccuggagggcaga

SEQ ID NO: 31530 - RNA, 20 nt, Artificial Sequence
  GATA2 Guide RNA
gccagggcucugggggcaga

SEQ ID NO: 31531 - RNA, 20 nt, Artificial Sequence
  GATA2 Guide RNA
gcccagccuggaguucggcu

SEQ ID NO: 31532 - RNA, 20 nt, Artificial Sequence
  GATA2 Guide RNA
gcccccagagcccuggcaag

SEQ ID NO: 31533 - RNA, 20 nt, Artificial Sequence
  GATA2 Guide RNA
gcccgucaaagcaggcacca

SEQ ID NO: 31534 - RNA, 20 nt, Artificial Sequence
  GATA2 Guide RNA
gcccuggcaaguggacccgc

SEQ ID NO: 31535 - RNA, 20 nt, Artificial Sequence
  GATA2 Guide RNA
gccgaacuccaggcugggcu

SEQ ID NO: 31536 - RNA, 20 nt, Artificial Sequence
  GATA2 Guide RNA
gccguggccacucuggcuuu

SEQ ID NO: 31537 - RNA, 20 nt, Artificial Sequence
  GATA2 Guide RNA
gccuaauccuuuuuccuucu

SEQ ID NO: 31538 - RNA, 20 nt, Artificial Sequence
  GATA2 Guide RNA
gccugcacccucuucuccuc

SEQ ID NO: 31539 - RNA, 20 nt, Artificial Sequence
  GATA2 Guide RNA
gccugcuuugacgggccagg

SEQ ID NO: 31540 - RNA, 20 nt, Artificial Sequence
  GATA2 Guide RNA
gccuggaguucggcuauuuc

SEQ ID NO: 31541 - RNA, 20 nt, Artificial Sequence
  GATA2 Guide RNA
gccuggcccgucaaagcagg

SEQ ID NO: 31542 - RNA, 20 nt, Artificial Sequence
  GATA2 Guide RNA
gcggguccacuugccagggc

SEQ ID NO: 31543 - RNA, 20 nt, Artificial Sequence
  GATA2 Guide RNA
gcuauuucagagagggaagc

SEQ ID NO: 31544 - RNA, 20 nt, Artificial Sequence
  GATA2 Guide RNA
gcucacccucccugggccgu

SEQ ID NO: 31545 - RNA, 20 nt, Artificial Sequence
  GATA2 Guide RNA
gcucagaccaccaagucucc

SEQ ID NO: 31546 - RNA, 20 nt, Artificial Sequence
  GATA2 Guide RNA
gcucagcccagccuggaguu

SEQ ID NO: 31547 - RNA, 20 nt, Artificial Sequence
  GATA2 Guide RNA
gcucugggggcagauuugug

SEQ ID NO: 31548 - RNA, 20 nt, Artificial Sequence
  GATA2 Guide RNA
gcucuuguuucuaacaagga

SEQ ID NO: 31549 - RNA, 20 nt, Artificial Sequence
  GATA2 Guide RNA
gcugagccaaagccagagug

SEQ ID NO: 31550 - RNA, 20 nt, Artificial Sequence
  GATA2 Guide RNA
gcugagguccccacaaaucu

SEQ ID NO: 31551 - RNA, 20 nt, Artificial Sequence
  GATA2 Guide RNA
gcugggcugagccaaagcca

SEQ ID NO: 31552 - RNA, 20 nt, Artificial Sequence
  GATA2 Guide RNA
gcuggugccugcuuugacgg

SEQ ID NO: 31553 - RNA, 20 nt, Artificial Sequence
  GATA2 Guide RNA
gcugucccaaguccuccggu

SEQ ID NO: 31554 - RNA, 20 nt, Artificial Sequence
  GATA2 Guide RNA
gcuucccucucugaaauagc

SEQ ID NO: 31555 - RNA, 20 nt, Artificial Sequence
  GATA2 Guide RNA
gcuuugacgggccaggcccu

SEQ ID NO: 31556 - RNA, 20 nt, Artificial Sequence
  GATA2 Guide RNA
gcuuuggcucagcccagccu

SEQ ID NO: 31557 - RNA, 20 nt, Artificial Sequence
  GATA2 Guide RNA
ggaaaaaggauuaggcaaaa

SEQ ID NO: 31558 - RNA, 20 nt, Artificial Sequence
  GATA2 Guide RNA
ggaagaaccggaggacuugg

SEQ ID NO: 31559 - RNA, 20 nt, Artificial Sequence
  GATA2 Guide RNA
ggaagccagaggagaagagg

SEQ ID NO: 31560 - RNA, 20 nt, Artificial Sequence
  GATA2 Guide RNA
ggacagcucagaccaccaag

SEQ ID NO: 31561 - RNA, 20 nt, Artificial Sequence
  GATA2 Guide RNA
ggacccgccaaucccgagga

SEQ ID NO: 31562 - RNA, 20 nt, Artificial Sequence
  GATA2 Guide RNA
ggaccucagccugcacccuc

SEQ ID NO: 31563 - RNA, 20 nt, Artificial Sequence
  GATA2 Guide RNA
ggacuuggagacuugguggu

SEQ ID NO: 31564 - RNA, 20 nt, Artificial Sequence
  GATA2 Guide RNA
ggacuugggacagcucagac

SEQ ID NO: 31565 - RNA, 20 nt, Artificial Sequence
  GATA2 Guide RNA
ggagaagagggugcaggcug

SEQ ID NO: 31566 - RNA, 20 nt, Artificial Sequence
  GATA2 Guide RNA
ggagacuugguggucugagc

SEQ ID NO: 31567 - RNA, 20 nt, Artificial Sequence
  GATA2 Guide RNA
ggaggacuugggacagcuca

SEQ ID NO: 31568 - RNA, 20 nt, Artificial Sequence
  GATA2 Guide RNA
ggagggugagcuggugccug

SEQ ID NO: 31569 - RNA, 20 nt, Artificial Sequence
  GATA2 Guide RNA
ggaguucggcuauuucagag

SEQ ID NO: 31570 - RNA, 20 nt, Artificial Sequence
  GATA2 Guide RNA
ggauuggcggguccacuugc

SEQ ID NO: 31571 - RNA, 20 nt, Artificial Sequence
  GATA2 Guide RNA
ggcaaguggacccgccaauc

SEQ ID NO: 31572 - RNA, 20 nt, Artificial Sequence
  GATA2 Guide RNA
ggcaccagcucacccucccu

SEQ ID NO: 31573 - RNA, 20 nt, Artificial Sequence
  GATA2 Guide RNA
ggcagauuuguggggaccuc

SEQ ID NO: 31574 - RNA, 20 nt, Artificial Sequence
  GATA2 Guide RNA
ggccacggcccagggagggu

SEQ ID NO: 31575 - RNA, 20 nt, Artificial Sequence
  GATA2 Guide RNA
ggccacucuggcuuuggcuc

SEQ ID NO: 31576 - RNA, 20 nt, Artificial Sequence
  GATA2 Guide RNA
ggccaggcccuggagggcag

SEQ ID NO: 31577 - RNA, 20 nt, Artificial Sequence
  GATA2 Guide RNA
ggcccgucaaagcaggcacc

SEQ ID NO: 31578 - RNA, 20 nt, Artificial Sequence
  GATA2 Guide RNA
ggccguggccacucuggcuu

SEQ ID NO: 31579 - RNA, 20 nt, Artificial Sequence
  GATA2 Guide RNA
ggcggguccacuugccaggg

SEQ ID NO: 31580 - RNA, 20 nt, Artificial Sequence
  GATA2 Guide RNA
ggcuauuucagagagggaag

SEQ ID NO: 31581 - RNA, 20 nt, Artificial Sequence
  GATA2 Guide RNA
ggcucagcccagccuggagu

SEQ ID NO: 31582 - RNA, 20 nt, Artificial Sequence
  GATA2 Guide RNA
ggcucugggggcagauuugu

SEQ ID NO: 31583 - RNA, 20 nt, Artificial Sequence
  GATA2 Guide RNA
ggcugagccaaagccagagu

SEQ ID NO: 31584 - RNA, 20 nt, Artificial Sequence
  GATA2 Guide RNA
ggcugagguccccacaaauc

SEQ ID NO: 31585 - RNA, 20 nt, Artificial Sequence
  GATA2 Guide RNA
ggcugggcugagccaaagcc

SEQ ID NO: 31586 - RNA, 20 nt, Artificial Sequence
  GATA2 Guide RNA
ggcuucccucucugaaauag

SEQ ID NO: 31587 - RNA, 20 nt, Artificial Sequence
  GATA2 Guide RNA
ggcuuuggcucagcccagcc

SEQ ID NO: 31588 - RNA, 20 nt, Artificial Sequence
  GATA2 Guide RNA
gggaagccagaggagaagag

SEQ ID NO: 31589 - RNA, 20 nt, Artificial Sequence
  GATA2 Guide RNA
gggacagcucagaccaccaa

SEQ ID NO: 31590 - RNA, 20 nt, Artificial Sequence
  GATA2 Guide RNA
gggaccucagccugcacccu

SEQ ID NO: 31591 - RNA, 20 nt, Artificial Sequence
  GATA2 Guide RNA
gggagggugagcuggugccu

SEQ ID NO: 31592 - RNA, 20 nt, Artificial Sequence
  GATA2 Guide RNA
gggauuggcggguccacuug

SEQ ID NO: 31593 - RNA, 20 nt, Artificial Sequence
  GATA2 Guide RNA
gggcagauuuguggggaccu

SEQ ID NO: 31594 - RNA, 20 nt, Artificial Sequence
  GATA2 Guide RNA
gggccaggcccuggagggca

SEQ ID NO: 31595 - RNA, 20 nt, Artificial Sequence
  GATA2 Guide RNA
gggccguggccacucuggcu

SEQ ID NO: 31596 - RNA, 20 nt, Artificial Sequence
  GATA2 Guide RNA
gggcucugggggcagauuug

SEQ ID NO: 31597 - RNA, 20 nt, Artificial Sequence
  GATA2 Guide RNA
gggcugagccaaagccagag

SEQ ID NO: 31598 - RNA, 20 nt, Artificial Sequence
  GATA2 Guide RNA
ggggaccucagccugcaccc

SEQ ID NO: 31599 - RNA, 20 nt, Artificial Sequence
  GATA2 Guide RNA
ggggcagauuuguggggacc

SEQ ID NO: 31600 - RNA, 20 nt, Artificial Sequence
  GATA2 Guide RNA
gggggcagauuuguggggac

SEQ ID NO: 31601 - RNA, 20 nt, Artificial Sequence
  GATA2 Guide RNA
ggguccacuugccagggcuc

SEQ ID NO: 31602 - RNA, 20 nt, Artificial Sequence
  GATA2 Guide RNA
gggugagcuggugccugcuu

SEQ ID NO: 31603 - RNA, 20 nt, Artificial Sequence
  GATA2 Guide RNA
gggugcaggcugaggucccc

SEQ ID NO: 31604 - RNA, 20 nt, Artificial Sequence
  GATA2 Guide RNA
gguccacuugccagggcucu

SEQ ID NO: 31605 - RNA, 20 nt, Artificial Sequence
  GATA2 Guide RNA
gguccccacaaaucugcccc

SEQ ID NO: 31606 - RNA, 20 nt, Artificial Sequence
  GATA2 Guide RNA
ggucugagcugucccaaguc

SEQ ID NO: 31607 - RNA, 20 nt, Artificial Sequence
  GATA2 Guide RNA
ggugagcuggugccugcuuu

SEQ ID NO: 31608 - RNA, 20 nt, Artificial Sequence
  GATA2 Guide RNA
ggugcaggcugaggucccca

SEQ ID NO: 31609 - RNA, 20 nt, Artificial Sequence
  GATA2 Guide RNA
ggugccugcuuugacgggcc

SEQ ID NO: 31610 - RNA, 20 nt, Artificial Sequence
  GATA2 Guide RNA
gguggucugagcugucccaa

SEQ ID NO: 31611 - RNA, 20 nt, Artificial Sequence
  GATA2 Guide RNA
gucaaagcaggcaccagcuc

SEQ ID NO: 31612 - RNA, 20 nt, Artificial Sequence
  GATA2 Guide RNA
guccacuugccagggcucug

SEQ ID NO: 31613 - RNA, 20 nt, Artificial Sequence
  GATA2 Guide RNA
gucccaaguccuccgguucu

SEQ ID NO: 31614 - RNA, 20 nt, Artificial Sequence
  GATA2 Guide RNA
guccccacaaaucugccccc

SEQ ID NO: 31615 - RNA, 20 nt, Artificial Sequence
  GATA2 Guide RNA
guccuccgguucuuccucgg

SEQ ID NO: 31616 - RNA, 20 nt, Artificial Sequence
  GATA2 Guide RNA
guccuuguuagaaacaagag

SEQ ID NO: 31617 - RNA, 20 nt, Artificial Sequence
  GATA2 Guide RNA
gucuccaaguccuuguuaga

SEQ ID NO: 31618 - RNA, 20 nt, Artificial Sequence
  GATA2 Guide RNA
gucucugcccuccagggccu

SEQ ID NO: 31619 - RNA, 20 nt, Artificial Sequence
  GATA2 Guide RNA
gucugagcugucccaagucc

SEQ ID NO: 31620 - RNA, 20 nt, Artificial Sequence
  GATA2 Guide RNA
gugagcuggugccugcuuug

SEQ ID NO: 31621 - RNA, 20 nt, Artificial Sequence
  GATA2 Guide RNA
gugcaggcugagguccccac

SEQ ID NO: 31622 - RNA, 20 nt, Artificial Sequence
  GATA2 Guide RNA
gugccugcuuugacgggcca

SEQ ID NO: 31623 - RNA, 20 nt, Artificial Sequence
  GATA2 Guide RNA
guggacccgccaaucccgag

SEQ ID NO: 31624 - RNA, 20 nt, Artificial Sequence
  GATA2 Guide RNA
guggccacggcccagggagg

SEQ ID NO: 31625 - RNA, 20 nt, Artificial Sequence
  GATA2 Guide RNA
guggccacucuggcuuuggc

SEQ ID NO: 31626 - RNA, 20 nt, Artificial Sequence
  GATA2 Guide RNA
guggggaccucagccugcac

SEQ ID NO: 31627 - RNA, 20 nt, Artificial Sequence
  GATA2 Guide RNA
guggucugagcugucccaag

SEQ ID NO: 31628 - RNA, 20 nt, Artificial Sequence
  GATA2 Guide RNA
guuagaaacaagagcaaaau

SEQ ID NO: 31629 - RNA, 20 nt, Artificial Sequence
  GATA2 Guide RNA
guucggcuauuucagagagg

SEQ ID NO: 31630 - RNA, 20 nt, Artificial Sequence
  GATA2 Guide RNA
guucuuccucgggauuggcg

SEQ ID NO: 31631 - RNA, 20 nt, Artificial Sequence
  GATA2 Guide RNA
guuucuaacaaggacuugga

SEQ ID NO: 31632 - RNA, 20 nt, Artificial Sequence
  GATA2 Guide RNA
uaacaaggacuuggagacuu

SEQ ID NO: 31633 - RNA, 20 nt, Artificial Sequence
  GATA2 Guide RNA
uagaaggaaaaaggauuagg

SEQ ID NO: 31634 - RNA, 20 nt, Artificial Sequence
  GATA2 Guide RNA
uagccgaacuccaggcuggg

SEQ ID NO: 31635 - RNA, 20 nt, Artificial Sequence
  GATA2 Guide RNA
uauuucagagagggaagcca

SEQ ID NO: 31636 - RNA, 20 nt, Artificial Sequence
  GATA2 Guide RNA
ucaaagcaggcaccagcuca

SEQ ID NO: 31637 - RNA, 20 nt, Artificial Sequence
  GATA2 Guide RNA
ucacccucccugggccgugg

SEQ ID NO: 31638 - RNA, 20 nt, Artificial Sequence
  GATA2 Guide RNA
ucagaccaccaagucuccaa

SEQ ID NO: 31639 - RNA, 20 nt, Artificial Sequence
  GATA2 Guide RNA
ucagagagggaagccagagg

SEQ ID NO: 31640 - RNA, 20 nt, Artificial Sequence
  GATA2 Guide RNA
ucagcccagccuggaguucg

SEQ ID NO: 31641 - RNA, 20 nt, Artificial Sequence
  GATA2 Guide RNA
ucagccugcacccucuucuc

SEQ ID NO: 31642 - RNA, 20 nt, Artificial Sequence
  GATA2 Guide RNA
uccaaguccuuguuagaaac

SEQ ID NO: 31643 - RNA, 20 nt, Artificial Sequence
  GATA2 Guide RNA
uccacuugccagggcucugg

SEQ ID NO: 31644 - RNA, 20 nt, Artificial Sequence
  GATA2 Guide RNA
uccaggcugggcugagccaa

SEQ ID NO: 31645 - RNA, 20 nt, Artificial Sequence
  GATA2 Guide RNA
uccagggccuggcccgucaa

SEQ ID NO: 31646 - RNA, 20 nt, Artificial Sequence
  GATA2 Guide RNA
ucccaaguccuccgguucuu

SEQ ID NO: 31647 - RNA, 20 nt, Artificial Sequence
  GATA2 Guide RNA
uccccacaaaucugccccca

SEQ ID NO: 31648 - RNA, 20 nt, Artificial Sequence
  GATA2 Guide RNA
ucccgaggaagaaccggagg

SEQ ID NO: 31649 - RNA, 20 nt, Artificial Sequence
  GATA2 Guide RNA
ucccucucugaaauagccga

SEQ ID NO: 31650 - RNA, 20 nt, Artificial Sequence
  GATA2 Guide RNA
ucccugggccguggccacuc

SEQ ID NO: 31651 - RNA, 20 nt, Artificial Sequence
  GATA2 Guide RNA
uccuccgguucuuccucggg

SEQ ID NO: 31652 - RNA, 20 nt, Artificial Sequence
  GATA2 Guide RNA
uccucgggauuggcgggucc

SEQ ID NO: 31653 - RNA, 20 nt, Artificial Sequence
  GATA2 Guide RNA
uccucuggcuucccucucug

SEQ ID NO: 31654 - RNA, 20 nt, Artificial Sequence
  GATA2 Guide RNA
uccuuguuagaaacaagagc

SEQ ID NO: 31655 - RNA, 20 nt, Artificial Sequence
  GATA2 Guide RNA
ucggcuauuucagagaggga

SEQ ID NO: 31656 - RNA, 20 nt, Artificial Sequence
  GATA2 Guide RNA
ucgggauuggcggguccacu

SEQ ID NO: 31657 - RNA, 20 nt, Artificial Sequence
  GATA2 Guide RNA
ucuaacaaggacuuggagac

SEQ ID NO: 31658 - RNA, 20 nt, Artificial Sequence
  GATA2 Guide RNA
ucuccaaguccuuguuagaa

SEQ ID NO: 31659 - RNA, 20 nt, Artificial Sequence
  GATA2 Guide RNA
ucuccucuggcuucccucuc

SEQ ID NO: 31660 - RNA, 20 nt, Artificial Sequence
  GATA2 Guide RNA
ucucugaaauagccgaacuc

SEQ ID NO: 31661 - RNA, 20 nt, Artificial Sequence
  GATA2 Guide RNA
ucucugcccuccagggccug

SEQ ID NO: 31662 - RNA, 20 nt, Artificial Sequence
  GATA2 Guide RNA
ucugaaauagccgaacucca

SEQ ID NO: 31663 - RNA, 20 nt, Artificial Sequence
  GATA2 Guide RNA
ucugagcugucccaaguccu

SEQ ID NO: 31664 - RNA, 20 nt, Artificial Sequence
  GATA2 Guide RNA
ucugcccccagagcccuggc

SEQ ID NO: 31665 - RNA, 20 nt, Artificial Sequence
  GATA2 Guide RNA
ucugcccuccagggccuggc

SEQ ID NO: 31666 - RNA, 20 nt, Artificial Sequence
  GATA2 Guide RNA
ucuggcuucccucucugaaa

SEQ ID NO: 31667 - RNA, 20 nt, Artificial Sequence
  GATA2 Guide RNA
ucuggcuuuggcucagccca

SEQ ID NO: 31668 - RNA, 20 nt, Artificial Sequence
  GATA2 Guide RNA
ucugggggcagauuuguggg

SEQ ID NO: 31669 - RNA, 20 nt, Artificial Sequence
  GATA2 Guide RNA
ucuuccucgggauuggcggg

SEQ ID NO: 31670 - RNA, 20 nt, Artificial Sequence
  GATA2 Guide RNA
ucuucuccucuggcuucccu

SEQ ID NO: 31671 - RNA, 20 nt, Artificial Sequence
  GATA2 Guide RNA
ucuuguuucuaacaaggacu

SEQ ID NO: 31672 - RNA, 20 nt, Artificial Sequence
  GATA2 Guide RNA
ugaaauagccgaacuccagg

SEQ ID NO: 31673 - RNA, 20 nt, Artificial Sequence
  GATA2 Guide RNA
ugacgggccaggcccuggag

SEQ ID NO: 31674 - RNA, 20 nt, Artificial Sequence
  GATA2 Guide RNA
ugagccaaagccagaguggc

SEQ ID NO: 31675 - RNA, 20 nt, Artificial Sequence
  GATA2 Guide RNA
ugagcuggugccugcuuuga

SEQ ID NO: 31676 - RNA, 20 nt, Artificial Sequence
  GATA2 Guide RNA
ugagcugucccaaguccucc

SEQ ID NO: 31677 - RNA, 20 nt, Artificial Sequence
  GATA2 Guide RNA
ugagguccccacaaaucugc

SEQ ID NO: 31678 - RNA, 20 nt, Artificial Sequence
  GATA2 Guide RNA
ugcacccucuucuccucugg

SEQ ID NO: 31679 - RNA, 20 nt, Artificial Sequence
  GATA2 Guide RNA
ugcaggcugagguccccaca

SEQ ID NO: 31680 - RNA, 20 nt, Artificial Sequence
  GATA2 Guide RNA
ugccagggcucugggggcag

SEQ ID NO: 31681 - RNA, 20 nt, Artificial Sequence
  GATA2 Guide RNA
ugcccccagagcccuggcaa

SEQ ID NO: 31682 - RNA, 20 nt, Artificial Sequence
  GATA2 Guide RNA
ugcccuccagggccuggccc

SEQ ID NO: 31683 - RNA, 20 nt, Artificial Sequence
  GATA2 Guide RNA
ugccuaauccuuuuuccuuc

SEQ ID NO: 31684 - RNA, 20 nt, Artificial Sequence
  GATA2 Guide RNA
ugccugcuuugacgggccag

SEQ ID NO: 31685 - RNA, 20 nt, Artificial Sequence
  GATA2 Guide RNA
ugcucuuguuucuaacaagg

SEQ ID NO: 31686 - RNA, 20 nt, Artificial Sequence
  GATA2 Guide RNA
ugcuuugacgggccaggccc

SEQ ID NO: 31687 - RNA, 20 nt, Artificial Sequence
  GATA2 Guide RNA
uggacccgccaaucccgagg

SEQ ID NO: 31688 - RNA, 20 nt, Artificial Sequence
  GATA2 Guide RNA
uggagacuugguggucugag

SEQ ID NO: 31689 - RNA, 20 nt, Artificial Sequence
  GATA2 Guide RNA
uggaguucggcuauuucaga

SEQ ID NO: 31690 - RNA, 20 nt, Artificial Sequence
  GATA2 Guide RNA
uggcaaguggacccgccaau

SEQ ID NO: 31691 - RNA, 20 nt, Artificial Sequence
  GATA2 Guide RNA
uggccacggcccagggaggg

SEQ ID NO: 31692 - RNA, 20 nt, Artificial Sequence
  GATA2 Guide RNA
uggccacucuggcuuuggcu

SEQ ID NO: 31693 - RNA, 20 nt, Artificial Sequence
  GATA2 Guide RNA
uggcccgucaaagcaggcac

SEQ ID NO: 31694 - RNA, 20 nt, Artificial Sequence
  GATA2 Guide RNA
uggcggguccacuugccagg

SEQ ID NO: 31695 - RNA, 20 nt, Artificial Sequence
  GATA2 Guide RNA
uggcucagcccagccuggag

SEQ ID NO: 31696 - RNA, 20 nt, Artificial Sequence
  GATA2 Guide RNA
uggcuucccucucugaaaua

SEQ ID NO: 31697 - RNA, 20 nt, Artificial Sequence
  GATA2 Guide RNA
uggcuuuggcucagcccagc

SEQ ID NO: 31698 - RNA, 20 nt, Artificial Sequence
  GATA2 Guide RNA
ugggacagcucagaccacca

SEQ ID NO: 31699 - RNA, 20 nt, Artificial Sequence
  GATA2 Guide RNA
ugggccguggccacucuggc

SEQ ID NO: 31700 - RNA, 20 nt, Artificial Sequence
  GATA2 Guide RNA
ugggcugagccaaagccaga

SEQ ID NO: 31701 - RNA, 20 nt, Artificial Sequence
  GATA2 Guide RNA
uggggaccucagccugcacc

SEQ ID NO: 31702 - RNA, 20 nt, Artificial Sequence
  GATA2 Guide RNA
ugggggcagauuugugggga

SEQ ID NO: 31703 - RNA, 20 nt, Artificial Sequence
  GATA2 Guide RNA
uggucugagcugucccaagu

SEQ ID NO: 31704 - RNA, 20 nt, Artificial Sequence
  GATA2 Guide RNA
uggugccugcuuugacgggc

SEQ ID NO: 31705 - RNA, 20 nt, Artificial Sequence
  GATA2 Guide RNA
ugguggucugagcuguccca

SEQ ID NO: 31706 - RNA, 20 nt, Artificial Sequence
  GATA2 Guide RNA
ugucccaaguccuccgguuc

SEQ ID NO: 31707 - RNA, 20 nt, Artificial Sequence
  GATA2 Guide RNA
ugucucugcccuccagggcc

SEQ ID NO: 31708 - RNA, 20 nt, Artificial Sequence
  GATA2 Guide RNA
uguggggaccucagccugca

SEQ ID NO: 31709 - RNA, 20 nt, Artificial Sequence
  GATA2 Guide RNA
uguuagaaacaagagcaaaa

SEQ ID NO: 31710 - RNA, 20 nt, Artificial Sequence
  GATA2 Guide RNA
uguuucuaacaaggacuugg

SEQ ID NO: 31711 - RNA, 20 nt, Artificial Sequence
  GATA2 Guide RNA
uuagaaggaaaaaggauuag

SEQ ID NO: 31712 - RNA, 20 nt, Artificial Sequence
  GATA2 Guide RNA
uucagagagggaagccagag

SEQ ID NO: 31713 - RNA, 20 nt, Artificial Sequence
  GATA2 Guide RNA
uucccucucugaaauagccg

SEQ ID NO: 31714 - RNA, 20 nt, Artificial Sequence
  GATA2 Guide RNA
uuccucgggauuggcggguc

SEQ ID NO: 31715 - RNA, 20 nt, Artificial Sequence
  GATA2 Guide RNA
uucggcuauuucagagaggg

SEQ ID NO: 31716 - RNA, 20 nt, Artificial Sequence
  GATA2 Guide RNA
uucuaacaaggacuuggaga

SEQ ID NO: 31717 - RNA, 20 nt, Artificial Sequence
  GATA2 Guide RNA
uucuccucuggcuucccucu

SEQ ID NO: 31718 - RNA, 20 nt, Artificial Sequence
  GATA2 Guide RNA
uucuuccucgggauuggcgg

SEQ ID NO: 31719 - RNA, 20 nt, Artificial Sequence
  GATA2 Guide RNA
uugacgggccaggcccugga

SEQ ID NO: 31720 - RNA, 20 nt, Artificial Sequence
  GATA2 Guide RNA
uugccagggcucugggggca

SEQ ID NO: 31721 - RNA, 20 nt, Artificial Sequence
  GATA2 Guide RNA
uugccuaauccuuuuuccuu

SEQ ID NO: 31722 - RNA, 20 nt, Artificial Sequence
  GATA2 Guide RNA
uugcucuuguuucuaacaag

SEQ ID NO: 31723 - RNA, 20 nt, Artificial Sequence
  GATA2 Guide RNA
uuggagacuugguggucuga

SEQ ID NO: 31724 - RNA, 20 nt, Artificial Sequence
  GATA2 Guide RNA
uuggcggguccacuugccag

SEQ ID NO: 31725 - RNA, 20 nt, Artificial Sequence
  GATA2 Guide RNA
uuggcucagcccagccugga

SEQ ID NO: 31726 - RNA, 20 nt, Artificial Sequence
  GATA2 Guide RNA
uugggacagcucagaccacc

SEQ ID NO: 31727 - RNA, 20 nt, Artificial Sequence
  GATA2 Guide RNA
uugguggucugagcuguccc

SEQ ID NO: 31728 - RNA, 20 nt, Artificial Sequence
  GATA2 Guide RNA
uuguggggaccucagccugc

SEQ ID NO: 31729 - RNA, 20 nt, Artificial Sequence
  GATA2 Guide RNA
uuguuagaaacaagagcaaa

SEQ ID NO: 31730 - RNA, 20 nt, Artificial Sequence
  GATA2 Guide RNA
uuguuucuaacaaggacuug

SEQ ID NO: 31731 - RNA, 20 nt, Artificial Sequence
  GATA2 Guide RNA
uuucagagagggaagccaga

SEQ ID NO: 31732 - RNA, 20 nt, Artificial Sequence
  GATA2 Guide RNA
uuucuaacaaggacuuggag

SEQ ID NO: 31733 - RNA, 20 nt, Artificial Sequence
  GATA2 Guide RNA
uuugacgggccaggcccugg

SEQ ID NO: 31734 - RNA, 20 nt, Artificial Sequence
  GATA2 Guide RNA
uuugccuaauccuuuuuccu

SEQ ID NO: 31735 - RNA, 20 nt, Artificial Sequence
  GATA2 Guide RNA
uuugcucuuguuucuaacaa

SEQ ID NO: 31736 - RNA, 20 nt, Artificial Sequence
  GATA2 Guide RNA
uuuggcucagcccagccugg

SEQ ID NO: 31737 - RNA, 20 nt, Artificial Sequence
  GATA2 Guide RNA
uuuguggggaccucagccug

SEQ ID NO: 31738 - RNA, 20 nt, Artificial Sequence
  GATA2 Guide RNA
uuuugccuaauccuuuuucc

SEQ ID NO: 31739 - RNA, 20 nt, Artificial Sequence
  GATA2 Guide RNA
uuuugcucuuguuucuaaca

SEQ ID NO: 31740 - RNA, 20 nt, Artificial Sequence
  GATA2 Guide RNA
uuuuugccuaauccuuuuuc

SEQ ID NO: 31741 - RNA, 21 nt, Artificial Sequence
  GATA2 Guide RNA
aaagcaggcaccagcucaccc

SEQ ID NO: 31742 - RNA, 21 nt, Artificial Sequence
  GATA2 Guide RNA
aaagccagaguggccacggcc

SEQ ID NO: 31743 - RNA, 21 nt, Artificial Sequence
  GATA2 Guide RNA
aaauagccgaacuccaggcug

SEQ ID NO: 31744 - RNA, 21 nt, Artificial Sequence
  GATA2 Guide RNA
aaaucugcccccagagcccug

SEQ ID NO: 31745 - RNA, 21 nt, Artificial Sequence
  GATA2 Guide RNA
aacaaggacuuggagacuugg

SEQ ID NO: 31746 - RNA, 21 nt, Artificial Sequence
  GATA2 Guide RNA
aaccggaggacuugggacagc

SEQ ID NO: 31747 - RNA, 21 nt, Artificial Sequence
  GATA2 Guide RNA
aacuccaggcugggcugagcc

SEQ ID NO: 31748 - RNA, 21 nt, Artificial Sequence
  GATA2 Guide RNA
aagaaccggaggacuugggac

SEQ ID NO: 31749 - RNA, 21 nt, Artificial Sequence
  GATA2 Guide RNA
aagagggugcaggcugagguc

SEQ ID NO: 31750 - RNA, 21 nt, Artificial Sequence
  GATA2 Guide RNA
aagcaggcaccagcucacccu

SEQ ID NO: 31751 - RNA, 21 nt, Artificial Sequence
  GATA2 Guide RNA
aagccagaggagaagagggug

SEQ ID NO: 31752 - RNA, 21 nt, Artificial Sequence
  GATA2 Guide RNA
aagccagaguggccacggccc

SEQ ID NO: 31753 - RNA, 21 nt, Artificial Sequence
  GATA2 Guide RNA
aaggaaaaaggauuaggcaaa

SEQ ID NO: 31754 - RNA, 21 nt, Artificial Sequence
  GATA2 Guide RNA
aaggacuuggagacuuggugg

SEQ ID NO: 31755 - RNA, 21 nt, Artificial Sequence
  GATA2 Guide RNA
aaguccuccgguucuuccucg

SEQ ID NO: 31756 - RNA, 21 nt, Artificial Sequence
  GATA2 Guide RNA
aaguccuuguuagaaacaaga

SEQ ID NO: 31757 - RNA, 21 nt, Artificial Sequence
  GATA2 Guide RNA
aagucuccaaguccuuguuag

SEQ ID NO: 31758 - RNA, 21 nt, Artificial Sequence
  GATA2 Guide RNA
aaguggacccgccaaucccga

SEQ ID NO: 31759 - RNA, 21 nt, Artificial Sequence
  GATA2 Guide RNA
aauagccgaacuccaggcugg

SEQ ID NO: 31760 - RNA, 21 nt, Artificial Sequence
  GATA2 Guide RNA
aaucccgaggaagaaccggag

SEQ ID NO: 31761 - RNA, 21 nt, Artificial Sequence
  GATA2 Guide RNA
aaucugcccccagagcccugg

SEQ ID NO: 31762 - RNA, 21 nt, Artificial Sequence
  GATA2 Guide RNA
acaaaucugcccccagagccc

SEQ ID NO: 31763 - RNA, 21 nt, Artificial Sequence
  GATA2 Guide RNA
acaaggacuuggagacuuggu

SEQ ID NO: 31764 - RNA, 21 nt, Artificial Sequence
  GATA2 Guide RNA
acagcucagaccaccaagucu

SEQ ID NO: 31765 - RNA, 21 nt, Artificial Sequence
  GATA2 Guide RNA
accaagucuccaaguccuugu

SEQ ID NO: 31766 - RNA, 21 nt, Artificial Sequence
  GATA2 Guide RNA
accaccaagucuccaaguccu

SEQ ID NO: 31767 - RNA, 21 nt, Artificial Sequence
  GATA2 Guide RNA
accagcucacccucccugggc

SEQ ID NO: 31768 - RNA, 21 nt, Artificial Sequence
  GATA2 Guide RNA
acccgccaaucccgaggaaga

SEQ ID NO: 31769 - RNA, 21 nt, Artificial Sequence
  GATA2 Guide RNA
acccucccugggccguggcca

SEQ ID NO: 31770 - RNA, 21 nt, Artificial Sequence
  GATA2 Guide RNA
acccucuucuccucuggcuuc

SEQ ID NO: 31771 - RNA, 21 nt, Artificial Sequence
  GATA2 Guide RNA
accggaggacuugggacagcu

SEQ ID NO: 31772 - RNA, 21 nt, Artificial Sequence
  GATA2 Guide RNA
accucagccugcacccucuuc

SEQ ID NO: 31773 - RNA, 21 nt, Artificial Sequence
  GATA2 Guide RNA
acggcccagggagggugagcu

SEQ ID NO: 31774 - RNA, 21 nt, Artificial Sequence
  GATA2 Guide RNA
acuccaggcugggcugagcca

SEQ ID NO: 31775 - RNA, 21 nt, Artificial Sequence
  GATA2 Guide RNA
acucuggcuuuggcucagccc

SEQ ID NO: 31776 - RNA, 21 nt, Artificial Sequence
  GATA2 Guide RNA
acuugccagggcucugggggc

SEQ ID NO: 31777 - RNA, 21 nt, Artificial Sequence
  GATA2 Guide RNA
acuuggagacuugguggucug

SEQ ID NO: 31778 - RNA, 21 nt, Artificial Sequence
  GATA2 Guide RNA
acuugggacagcucagaccac

SEQ ID NO: 31779 - RNA, 21 nt, Artificial Sequence
  GATA2 Guide RNA
acuugguggucugagcugucc

SEQ ID NO: 31780 - RNA, 21 nt, Artificial Sequence
  GATA2 Guide RNA
agaaccggaggacuugggaca

SEQ ID NO: 31781 - RNA, 21 nt, Artificial Sequence
  GATA2 Guide RNA
agaagagggugcaggcugagg

SEQ ID NO: 31782 - RNA, 21 nt, Artificial Sequence
  GATA2 Guide RNA
agaaggaaaaaggauuaggca

SEQ ID NO: 31783 - RNA, 21 nt, Artificial Sequence
  GATA2 Guide RNA
agaccaccaagucuccaaguc

SEQ ID NO: 31784 - RNA, 21 nt, Artificial Sequence
  GATA2 Guide RNA
agacuugguggucugagcugu

SEQ ID NO: 31785 - RNA, 21 nt, Artificial Sequence
  GATA2 Guide RNA
agagagggaagccagaggaga

SEQ ID NO: 31786 - RNA, 21 nt, Artificial Sequence
  GATA2 Guide RNA
agagcccuggcaaguggaccc

SEQ ID NO: 31787 - RNA, 21 nt, Artificial Sequence
  GATA2 Guide RNA
agaggagaagagggugcaggc

SEQ ID NO: 31788 - RNA, 21 nt, Artificial Sequence
  GATA2 Guide RNA
agagggaagccagaggagaag

SEQ ID NO: 31789 - RNA, 21 nt, Artificial Sequence
  GATA2 Guide RNA
agagggugcaggcugaggucc

SEQ ID NO: 31790 - RNA, 21 nt, Artificial Sequence
  GATA2 Guide RNA
agaguggccacggcccaggga

SEQ ID NO: 31791 - RNA, 21 nt, Artificial Sequence
  GATA2 Guide RNA
agauuuguggggaccucagcc

SEQ ID NO: 31792 - RNA, 21 nt, Artificial Sequence
  GATA2 Guide RNA
agcaggcaccagcucacccuc

SEQ ID NO: 31793 - RNA, 21 nt, Artificial Sequence
  GATA2 Guide RNA
agccaaagccagaguggccac

SEQ ID NO: 31794 - RNA, 21 nt, Artificial Sequence
  GATA2 Guide RNA
agccagaggagaagagggugc

SEQ ID NO: 31795 - RNA, 21 nt, Artificial Sequence
  GATA2 Guide RNA
agccagaguggccacggccca

SEQ ID NO: 31796 - RNA, 21 nt, Artificial Sequence
  GATA2 Guide RNA
agcccagccuggaguucggcu

SEQ ID NO: 31797 - RNA, 21 nt, Artificial Sequence
  GATA2 Guide RNA
agcccuggcaaguggacccgc

SEQ ID NO: 31798 - RNA, 21 nt, Artificial Sequence
  GATA2 Guide RNA
agccgaacuccaggcugggcu

SEQ ID NO: 31799 - RNA, 21 nt, Artificial Sequence
  GATA2 Guide RNA
agccugcacccucuucuccuc

SEQ ID NO: 31800 - RNA, 21 nt, Artificial Sequence
  GATA2 Guide RNA
agccuggaguucggcuauuuc

SEQ ID NO: 31801 - RNA, 21 nt, Artificial Sequence
  GATA2 Guide RNA
agcucacccucccugggccgu

SEQ ID NO: 31802 - RNA, 21 nt, Artificial Sequence
  GATA2 Guide RNA
agcucagaccaccaagucucc

SEQ ID NO: 31803 - RNA, 21 nt, Artificial Sequence
  GATA2 Guide RNA
agcuggugccugcuuugacgg

SEQ ID NO: 31804 - RNA, 21 nt, Artificial Sequence
  GATA2 Guide RNA
agcugucccaaguccuccggu

SEQ ID NO: 31805 - RNA, 21 nt, Artificial Sequence
  GATA2 Guide RNA
aggaaaaaggauuaggcaaaa

SEQ ID NO: 31806 - RNA, 21 nt, Artificial Sequence
  GATA2 Guide RNA
aggaagaaccggaggacuugg

SEQ ID NO: 31807 - RNA, 21 nt, Artificial Sequence
  GATA2 Guide RNA
aggacuuggagacuugguggu

SEQ ID NO: 31808 - RNA, 21 nt, Artificial Sequence
  GATA2 Guide RNA
aggacuugggacagcucagac

SEQ ID NO: 31809 - RNA, 21 nt, Artificial Sequence
  GATA2 Guide RNA
aggagaagagggugcaggcug

SEQ ID NO: 31810 - RNA, 21 nt, Artificial Sequence
  GATA2 Guide RNA
aggcaccagcucacccucccu

SEQ ID NO: 31811 - RNA, 21 nt, Artificial Sequence
  GATA2 Guide RNA
aggcugagguccccacaaauc

SEQ ID NO: 31812 - RNA, 21 nt, Artificial Sequence
  GATA2 Guide RNA
aggcugggcugagccaaagcc

SEQ ID NO: 31813 - RNA, 21 nt, Artificial Sequence
  GATA2 Guide RNA
agggaagccagaggagaagag

SEQ ID NO: 31814 - RNA, 21 nt, Artificial Sequence
  GATA2 Guide RNA
agggagggugagcuggugccu

SEQ ID NO: 31815 - RNA, 21 nt, Artificial Sequence
  GATA2 Guide RNA
agggcucugggggcagauuug

SEQ ID NO: 31816 - RNA, 21 nt, Artificial Sequence
  GATA2 Guide RNA
agggugagcuggugccugcuu

SEQ ID NO: 31817 - RNA, 21 nt, Artificial Sequence
  GATA2 Guide RNA
agggugcaggcugaggucccc

SEQ ID NO: 31818 - RNA, 21 nt, Artificial Sequence
  GATA2 Guide RNA
agguccccacaaaucugcccc

SEQ ID NO: 31819 - RNA, 21 nt, Artificial Sequence
  GATA2 Guide RNA
aguccuccgguucuuccucgg

SEQ ID NO: 31820 - RNA, 21 nt, Artificial Sequence
  GATA2 Guide RNA
aguccuuguuagaaacaagag

SEQ ID NO: 31821 - RNA, 21 nt, Artificial Sequence
  GATA2 Guide RNA
agucuccaaguccuuguuaga

SEQ ID NO: 31822 - RNA, 21 nt, Artificial Sequence
  GATA2 Guide RNA
aguggacccgccaaucccgag

SEQ ID NO: 31823 - RNA, 21 nt, Artificial Sequence
  GATA2 Guide RNA
aguggccacggcccagggagg

SEQ ID NO: 31824 - RNA, 21 nt, Artificial Sequence
  GATA2 Guide RNA
aguucggcuauuucagagagg

SEQ ID NO: 31825 - RNA, 21 nt, Artificial Sequence
  GATA2 Guide RNA
auagccgaacuccaggcuggg

SEQ ID NO: 31826 - RNA, 21 nt, Artificial Sequence
  GATA2 Guide RNA
aucccgaggaagaaccggagg

SEQ ID NO: 31827 - RNA, 21 nt, Artificial Sequence
  GATA2 Guide RNA
aucugcccccagagcccuggc

SEQ ID NO: 31828 - RNA, 21 nt, Artificial Sequence
  GATA2 Guide RNA
auuggcggguccacuugccag

SEQ ID NO: 31829 - RNA, 21 nt, Artificial Sequence
  GATA2 Guide RNA
auuucagagagggaagccaga

SEQ ID NO: 31830 - RNA, 21 nt, Artificial Sequence
  GATA2 Guide RNA
auuuguggggaccucagccug

SEQ ID NO: 31831 - RNA, 21 nt, Artificial Sequence
  GATA2 Guide RNA
caaagcaggcaccagcucacc

SEQ ID NO: 31832 - RNA, 21 nt, Artificial Sequence
  GATA2 Guide RNA
caaagccagaguggccacggc

SEQ ID NO: 31833 - RNA, 21 nt, Artificial Sequence
  GATA2 Guide RNA
caaaucugcccccagagcccu

SEQ ID NO: 31834 - RNA, 21 nt, Artificial Sequence
  GATA2 Guide RNA
caaggacuuggagacuuggug

SEQ ID NO: 31835 - RNA, 21 nt, Artificial Sequence
  GATA2 Guide RNA
caaguccuccgguucuuccuc

SEQ ID NO: 31836 - RNA, 21 nt, Artificial Sequence
  GATA2 Guide RNA
caaguccuuguuagaaacaag

SEQ ID NO: 31837 - RNA, 21 nt, Artificial Sequence
  GATA2 Guide RNA
caagucuccaaguccuuguua

SEQ ID NO: 31838 - RNA, 21 nt, Artificial Sequence
  GATA2 Guide RNA
caaguggacccgccaaucccg

SEQ ID NO: 31839 - RNA, 21 nt, Artificial Sequence
  GATA2 Guide RNA
caaucccgaggaagaaccgga

SEQ ID NO: 31840 - RNA, 21 nt, Artificial Sequence
  GATA2 Guide RNA
cacaaaucugcccccagagcc

SEQ ID NO: 31841 - RNA, 21 nt, Artificial Sequence
  GATA2 Guide RNA
caccaagucuccaaguccuug

SEQ ID NO: 31842 - RNA, 21 nt, Artificial Sequence
  GATA2 Guide RNA
caccagcucacccucccuggg

SEQ ID NO: 31843 - RNA, 21 nt, Artificial Sequence
  GATA2 Guide RNA
cacccucuucuccucuggcuu

SEQ ID NO: 31844 - RNA, 21 nt, Artificial Sequence
  GATA2 Guide RNA
cacggcccagggagggugagc

SEQ ID NO: 31845 - RNA, 21 nt, Artificial Sequence
  GATA2 Guide RNA
cacucuggcuuuggcucagcc

SEQ ID NO: 31846 - RNA, 21 nt, Artificial Sequence
  GATA2 Guide RNA
cacuugccagggcucuggggg

SEQ ID NO: 31847 - RNA, 21 nt, Artificial Sequence
  GATA2 Guide RNA
cagaccaccaagucuccaagu

SEQ ID NO: 31848 - RNA, 21 nt, Artificial Sequence
  GATA2 Guide RNA
cagagagggaagccagaggag

SEQ ID NO: 31849 - RNA, 21 nt, Artificial Sequence
  GATA2 Guide RNA
cagaggagaagagggugcagg

SEQ ID NO: 31850 - RNA, 21 nt, Artificial Sequence
  GATA2 Guide RNA
cagaguggccacggcccaggg

SEQ ID NO: 31851 - RNA, 21 nt, Artificial Sequence
  GATA2 Guide RNA
cagauuuguggggaccucagc

SEQ ID NO: 31852 - RNA, 21 nt, Artificial Sequence
  GATA2 Guide RNA
cagcccagccuggaguucggc

SEQ ID NO: 31853 - RNA, 21 nt, Artificial Sequence
  GATA2 Guide RNA
cagccugcacccucuucuccu

SEQ ID NO: 31854 - RNA, 21 nt, Artificial Sequence
  GATA2 Guide RNA
cagccuggaguucggcuauuu

SEQ ID NO: 31855 - RNA, 21 nt, Artificial Sequence
  GATA2 Guide RNA
cagcucacccucccugggccg

SEQ ID NO: 31856 - RNA, 21 nt, Artificial Sequence
  GATA2 Guide RNA
cagcucagaccaccaagucuc

SEQ ID NO: 31857 - RNA, 21 nt, Artificial Sequence
  GATA2 Guide RNA
caggcaccagcucacccuccc

SEQ ID NO: 31858 - RNA, 21 nt, Artificial Sequence
  GATA2 Guide RNA
caggcugagguccccacaaau

SEQ ID NO: 31859 - RNA, 21 nt, Artificial Sequence
  GATA2 Guide RNA
caggcugggcugagccaaagc

SEQ ID NO: 31860 - RNA, 21 nt, Artificial Sequence
  GATA2 Guide RNA
cagggagggugagcuggugcc

SEQ ID NO: 31861 - RNA, 21 nt, Artificial Sequence
  GATA2 Guide RNA
cagggcucugggggcagauuu

SEQ ID NO: 31862 - RNA, 21 nt, Artificial Sequence
  GATA2 Guide RNA
ccaaagccagaguggccacgg

SEQ ID NO: 31863 - RNA, 21 nt, Artificial Sequence
  GATA2 Guide RNA
ccaaguccuccgguucuuccu

SEQ ID NO: 31864 - RNA, 21 nt, Artificial Sequence
  GATA2 Guide RNA
ccaaguccuuguuagaaacaa

SEQ ID NO: 31865 - RNA, 21 nt, Artificial Sequence
  GATA2 Guide RNA
ccaagucuccaaguccuuguu

SEQ ID NO: 31866 - RNA, 21 nt, Artificial Sequence
  GATA2 Guide RNA
ccaaucccgaggaagaaccgg

SEQ ID NO: 31867 - RNA, 21 nt, Artificial Sequence
  GATA2 Guide RNA
ccacaaaucugcccccagagc

SEQ ID NO: 31868 - RNA, 21 nt, Artificial Sequence
  GATA2 Guide RNA
ccaccaagucuccaaguccuu

SEQ ID NO: 31869 - RNA, 21 nt, Artificial Sequence
  GATA2 Guide RNA
ccacggcccagggagggugag

SEQ ID NO: 31870 - RNA, 21 nt, Artificial Sequence
  GATA2 Guide RNA
ccacucuggcuuuggcucagc

SEQ ID NO: 31871 - RNA, 21 nt, Artificial Sequence
  GATA2 Guide RNA
ccacuugccagggcucugggg

SEQ ID NO: 31872 - RNA, 21 nt, Artificial Sequence
  GATA2 Guide RNA
ccagaggagaagagggugcag

SEQ ID NO: 31873 - RNA, 21 nt, Artificial Sequence
  GATA2 Guide RNA
ccagaguggccacggcccagg

SEQ ID NO: 31874 - RNA, 21 nt, Artificial Sequence
  GATA2 Guide RNA
ccagccuggaguucggcuauu

SEQ ID NO: 31875 - RNA, 21 nt, Artificial Sequence
  GATA2 Guide RNA
ccagcucacccucccugggcc

SEQ ID NO: 31876 - RNA, 21 nt, Artificial Sequence
  GATA2 Guide RNA
ccaggcugggcugagccaaag

SEQ ID NO: 31877 - RNA, 21 nt, Artificial Sequence
  GATA2 Guide RNA
ccagggagggugagcuggugc

SEQ ID NO: 31878 - RNA, 21 nt, Artificial Sequence
  GATA2 Guide RNA
ccagggccuggcccgucaaag

SEQ ID NO: 31879 - RNA, 21 nt, Artificial Sequence
  GATA2 Guide RNA
ccagggcucugggggcagauu

SEQ ID NO: 31880 - RNA, 21 nt, Artificial Sequence
  GATA2 Guide RNA
cccaaguccuccgguucuucc

SEQ ID NO: 31881 - RNA, 21 nt, Artificial Sequence
  GATA2 Guide RNA
cccacaaaucugcccccagag

SEQ ID NO: 31882 - RNA, 21 nt, Artificial Sequence
  GATA2 Guide RNA
cccagccuggaguucggcuau

SEQ ID NO: 31883 - RNA, 21 nt, Artificial Sequence
  GATA2 Guide RNA
ccccacaaaucugcccccaga

SEQ ID NO: 31884 - RNA, 21 nt, Artificial Sequence
  GATA2 Guide RNA
ccccagagcccuggcaagugg

SEQ ID NO: 31885 - RNA, 21 nt, Artificial Sequence
  GATA2 Guide RNA
cccccagagcccuggcaagug

SEQ ID NO: 31886 - RNA, 21 nt, Artificial Sequence
  GATA2 Guide RNA
cccgaggaagaaccggaggac

SEQ ID NO: 31887 - RNA, 21 nt, Artificial Sequence
  GATA2 Guide RNA
cccgccaaucccgaggaagaa

SEQ ID NO: 31888 - RNA, 21 nt, Artificial Sequence
  GATA2 Guide RNA
cccgucaaagcaggcaccagc

SEQ ID NO: 31889 - RNA, 21 nt, Artificial Sequence
  GATA2 Guide RNA
cccucucugaaauagccgaac

SEQ ID NO: 31890 - RNA, 21 nt, Artificial Sequence
  GATA2 Guide RNA
cccucuucuccucuggcuucc

SEQ ID NO: 31891 - RNA, 21 nt, Artificial Sequence
  GATA2 Guide RNA
cccuggcaaguggacccgcca

SEQ ID NO: 31892 - RNA, 21 nt, Artificial Sequence
  GATA2 Guide RNA
cccugggccguggccacucug

SEQ ID NO: 31893 - RNA, 21 nt, Artificial Sequence
  GATA2 Guide RNA
ccgaacuccaggcugggcuga

SEQ ID NO: 31894 - RNA, 21 nt, Artificial Sequence
  GATA2 Guide RNA
ccgaggaagaaccggaggacu

SEQ ID NO: 31895 - RNA, 21 nt, Artificial Sequence
  GATA2 Guide RNA
ccgccaaucccgaggaagaac

SEQ ID NO: 31896 - RNA, 21 nt, Artificial Sequence
  GATA2 Guide RNA
ccggaggacuugggacagcuc

SEQ ID NO: 31897 - RNA, 21 nt, Artificial Sequence
  GATA2 Guide RNA
ccgucaaagcaggcaccagcu

SEQ ID NO: 31898 - RNA, 21 nt, Artificial Sequence
  GATA2 Guide RNA
ccguggccacucuggcuuugg

SEQ ID NO: 31899 - RNA, 21 nt, Artificial Sequence
  GATA2 Guide RNA
ccucagccugcacccucuucu

SEQ ID NO: 31900 - RNA, 21 nt, Artificial Sequence
  GATA2 Guide RNA
ccuccagggccuggcccguca

SEQ ID NO: 31901 - RNA, 21 nt, Artificial Sequence
  GATA2 Guide RNA
ccucccugggccguggccacu

SEQ ID NO: 31902 - RNA, 21 nt, Artificial Sequence
  GATA2 Guide RNA
ccuccgguucuuccucgggau

SEQ ID NO: 31903 - RNA, 21 nt, Artificial Sequence
  GATA2 Guide RNA
ccucgggauuggcggguccac

SEQ ID NO: 31904 - RNA, 21 nt, Artificial Sequence
  GATA2 Guide RNA
ccucucugaaauagccgaacu

SEQ ID NO: 31905 - RNA, 21 nt, Artificial Sequence
  GATA2 Guide RNA
ccucuggcuucccucucugaa

SEQ ID NO: 31906 - RNA, 21 nt, Artificial Sequence
  GATA2 Guide RNA
ccucuucuccucuggcuuccc

SEQ ID NO: 31907 - RNA, 21 nt, Artificial Sequence
  GATA2 Guide RNA
ccugcacccucuucuccucug

SEQ ID NO: 31908 - RNA, 21 nt, Artificial Sequence
  GATA2 Guide RNA
ccugcuuugacgggccaggcc

SEQ ID NO: 31909 - RNA, 21 nt, Artificial Sequence
  GATA2 Guide RNA
ccuggaguucggcuauuucag

SEQ ID NO: 31910 - RNA, 21 nt, Artificial Sequence
  GATA2 Guide RNA
ccuggcaaguggacccgccaa

SEQ ID NO: 31911 - RNA, 21 nt, Artificial Sequence
  GATA2 Guide RNA
ccuggcccgucaaagcaggca

SEQ ID NO: 31912 - RNA, 21 nt, Artificial Sequence
  GATA2 Guide RNA
ccugggccguggccacucugg

SEQ ID NO: 31913 - RNA, 21 nt, Artificial Sequence
  GATA2 Guide RNA
ccuuguuagaaacaagagcaa

SEQ ID NO: 31914 - RNA, 21 nt, Artificial Sequence
  GATA2 Guide RNA
cgaacuccaggcugggcugag

SEQ ID NO: 31915 - RNA, 21 nt, Artificial Sequence
  GATA2 Guide RNA
cgaggaagaaccggaggacuu

SEQ ID NO: 31916 - RNA, 21 nt, Artificial Sequence
  GATA2 Guide RNA
cgccaaucccgaggaagaacc

SEQ ID NO: 31917 - RNA, 21 nt, Artificial Sequence
  GATA2 Guide RNA
cggaggacuugggacagcuca

SEQ ID NO: 31918 - RNA, 21 nt, Artificial Sequence
  GATA2 Guide RNA
cggcuauuucagagagggaag

SEQ ID NO: 31919 - RNA, 21 nt, Artificial Sequence
  GATA2 Guide RNA
cgggauuggcggguccacuug

SEQ ID NO: 31920 - RNA, 21 nt, Artificial Sequence
  GATA2 Guide RNA
cggguccacuugccagggcuc

SEQ ID NO: 31921 - RNA, 21 nt, Artificial Sequence
  GATA2 Guide RNA
cgucaaagcaggcaccagcuc

SEQ ID NO: 31922 - RNA, 21 nt, Artificial Sequence
  GATA2 Guide RNA
cguggccacucuggcuuuggc

SEQ ID NO: 31923 - RNA, 21 nt, Artificial Sequence
  GATA2 Guide RNA
cuaacaaggacuuggagacuu

SEQ ID NO: 31924 - RNA, 21 nt, Artificial Sequence
  GATA2 Guide RNA
cuauuucagagagggaagcca

SEQ ID NO: 31925 - RNA, 21 nt, Artificial Sequence
  GATA2 Guide RNA
cucacccucccugggccgugg

SEQ ID NO: 31926 - RNA, 21 nt, Artificial Sequence
  GATA2 Guide RNA
cucagaccaccaagucuccaa

SEQ ID NO: 31927 - RNA, 21 nt, Artificial Sequence
  GATA2 Guide RNA
cucagcccagccuggaguucg

SEQ ID NO: 31928 - RNA, 21 nt, Artificial Sequence
  GATA2 Guide RNA
cucagccugcacccucuucuc

SEQ ID NO: 31929 - RNA, 21 nt, Artificial Sequence
  GATA2 Guide RNA
cuccaaguccuuguuagaaac

SEQ ID NO: 31930 - RNA, 21 nt, Artificial Sequence
  GATA2 Guide RNA
cuccaggcugggcugagccaa

SEQ ID NO: 31931 - RNA, 21 nt, Artificial Sequence
  GATA2 Guide RNA
cuccagggccuggcccgucaa

SEQ ID NO: 31932 - RNA, 21 nt, Artificial Sequence
  GATA2 Guide RNA
cucccugggccguggccacuc

SEQ ID NO: 31933 - RNA, 21 nt, Artificial Sequence
  GATA2 Guide RNA
cuccucuggcuucccucucug

SEQ ID NO: 31934 - RNA, 21 nt, Artificial Sequence
  GATA2 Guide RNA
cucgggauuggcggguccacu

SEQ ID NO: 31935 - RNA, 21 nt, Artificial Sequence
  GATA2 Guide RNA
cucucugaaauagccgaacuc

SEQ ID NO: 31936 - RNA, 21 nt, Artificial Sequence
  GATA2 Guide RNA
cucugaaauagccgaacucca

SEQ ID NO: 31937 - RNA, 21 nt, Artificial Sequence
  GATA2 Guide RNA
cucugcccuccagggccuggc

SEQ ID NO: 31938 - RNA, 21 nt, Artificial Sequence
  GATA2 Guide RNA
cucuggcuucccucucugaaa

SEQ ID NO: 31939 - RNA, 21 nt, Artificial Sequence
  GATA2 Guide RNA
cucuggcuuuggcucagccca

SEQ ID NO: 31940 - RNA, 21 nt, Artificial Sequence
  GATA2 Guide RNA
cucugggggcagauuuguggg

SEQ ID NO: 31941 - RNA, 21 nt, Artificial Sequence
  GATA2 Guide RNA
cucuucuccucuggcuucccu

SEQ ID NO: 31942 - RNA, 21 nt, Artificial Sequence
  GATA2 Guide RNA
cucuuguuucuaacaaggacu

SEQ ID NO: 31943 - RNA, 21 nt, Artificial Sequence
  GATA2 Guide RNA
cugaaauagccgaacuccagg

SEQ ID NO: 31944 - RNA, 21 nt, Artificial Sequence
  GATA2 Guide RNA
cugagccaaagccagaguggc

SEQ ID NO: 31945 - RNA, 21 nt, Artificial Sequence
  GATA2 Guide RNA
cugagcugucccaaguccucc

SEQ ID NO: 31946 - RNA, 21 nt, Artificial Sequence
  GATA2 Guide RNA
cugagguccccacaaaucugc

SEQ ID NO: 31947 - RNA, 21 nt, Artificial Sequence
  GATA2 Guide RNA
cugcacccucuucuccucugg

SEQ ID NO: 31948 - RNA, 21 nt, Artificial Sequence
  GATA2 Guide RNA
cugcccccagagcccuggcaa

SEQ ID NO: 31949 - RNA, 21 nt, Artificial Sequence
  GATA2 Guide RNA
cugcuuugacgggccaggccc

SEQ ID NO: 31950 - RNA, 21 nt, Artificial Sequence
  GATA2 Guide RNA
cuggaguucggcuauuucaga

SEQ ID NO: 31951 - RNA, 21 nt, Artificial Sequence
  GATA2 Guide RNA
cuggcaaguggacccgccaau

SEQ ID NO: 31952 - RNA, 21 nt, Artificial Sequence
  GATA2 Guide RNA
cuggcccgucaaagcaggcac

SEQ ID NO: 31953 - RNA, 21 nt, Artificial Sequence
  GATA2 Guide RNA
cuggcuucccucucugaaaua

SEQ ID NO: 31954 - RNA, 21 nt, Artificial Sequence
  GATA2 Guide RNA
cuggcuuuggcucagcccagc

SEQ ID NO: 31955 - RNA, 21 nt, Artificial Sequence
  GATA2 Guide RNA
cugggccguggccacucuggc

SEQ ID NO: 31956 - RNA, 21 nt, Artificial Sequence
  GATA2 Guide RNA
cugggcugagccaaagccaga

SEQ ID NO: 31957 - RNA, 21 nt, Artificial Sequence
  GATA2 Guide RNA
cugggggcagauuugugggga

SEQ ID NO: 31958 - RNA, 21 nt, Artificial Sequence
  GATA2 Guide RNA
cuggugccugcuuugacgggc

SEQ ID NO: 31959 - RNA, 21 nt, Artificial Sequence
  GATA2 Guide RNA
cugucccaaguccuccgguuc

SEQ ID NO: 31960 - RNA, 21 nt, Artificial Sequence
  GATA2 Guide RNA
cuucccucucugaaauagccg

SEQ ID NO: 31961 - RNA, 21 nt, Artificial Sequence
  GATA2 Guide RNA
cuuccucgggauuggcggguc

SEQ ID NO: 31962 - RNA, 21 nt, Artificial Sequence
  GATA2 Guide RNA
cuucuccucuggcuucccucu

SEQ ID NO: 31963 - RNA, 21 nt, Artificial Sequence
  GATA2 Guide RNA
cuugccagggcucugggggca

SEQ ID NO: 31964 - RNA, 21 nt, Artificial Sequence
  GATA2 Guide RNA
cuuggagacuugguggucuga

SEQ ID NO: 31965 - RNA, 21 nt, Artificial Sequence
  GATA2 Guide RNA
cuugggacagcucagaccacc

SEQ ID NO: 31966 - RNA, 21 nt, Artificial Sequence
  GATA2 Guide RNA
cuugguggucugagcuguccc

SEQ ID NO: 31967 - RNA, 21 nt, Artificial Sequence
  GATA2 Guide RNA
cuuguuagaaacaagagcaaa

SEQ ID NO: 31968 - RNA, 21 nt, Artificial Sequence
  GATA2 Guide RNA
cuuguuucuaacaaggacuug

SEQ ID NO: 31969 - RNA, 21 nt, Artificial Sequence
  GATA2 Guide RNA
cuuugacgggccaggcccugg

SEQ ID NO: 31970 - RNA, 21 nt, Artificial Sequence
  GATA2 Guide RNA
cuuuggcucagcccagccugg

SEQ ID NO: 31971 - RNA, 21 nt, Artificial Sequence
  GATA2 Guide RNA
gaaauagccgaacuccaggcu

SEQ ID NO: 31972 - RNA, 21 nt, Artificial Sequence
  GATA2 Guide RNA
gaaccggaggacuugggacag

SEQ ID NO: 31973 - RNA, 21 nt, Artificial Sequence
  GATA2 Guide RNA
gaacuccaggcugggcugagc

SEQ ID NO: 31974 - RNA, 21 nt, Artificial Sequence
  GATA2 Guide RNA
gaagaaccggaggacuuggga

SEQ ID NO: 31975 - RNA, 21 nt, Artificial Sequence
  GATA2 Guide RNA
gaagagggugcaggcugaggu

SEQ ID NO: 31976 - RNA, 21 nt, Artificial Sequence
  GATA2 Guide RNA
gaagccagaggagaagagggu

SEQ ID NO: 31977 - RNA, 21 nt, Artificial Sequence
  GATA2 Guide RNA
gaaggaaaaaggauuaggcaa

SEQ ID NO: 31978 - RNA, 21 nt, Artificial Sequence
  GATA2 Guide RNA
gacagcucagaccaccaaguc

SEQ ID NO: 31979 - RNA, 21 nt, Artificial Sequence
  GATA2 Guide RNA
gaccaccaagucuccaagucc

SEQ ID NO: 31980 - RNA, 21 nt, Artificial Sequence
  GATA2 Guide RNA
gacccgccaaucccgaggaag

SEQ ID NO: 31981 - RNA, 21 nt, Artificial Sequence
  GATA2 Guide RNA
gaccucagccugcacccucuu

SEQ ID NO: 31982 - RNA, 21 nt, Artificial Sequence
  GATA2 Guide RNA
gacuuggagacuugguggucu

SEQ ID NO: 31983 - RNA, 21 nt, Artificial Sequence
  GATA2 Guide RNA
gacuugggacagcucagacca

SEQ ID NO: 31984 - RNA, 21 nt, Artificial Sequence
  GATA2 Guide RNA
gacuugguggucugagcuguc

SEQ ID NO: 31985 - RNA, 21 nt, Artificial Sequence
  GATA2 Guide RNA
gagaagagggugcaggcugag

SEQ ID NO: 31986 - RNA, 21 nt, Artificial Sequence
  GATA2 Guide RNA
gagacuugguggucugagcug

SEQ ID NO: 31987 - RNA, 21 nt, Artificial Sequence
  GATA2 Guide RNA
gagagggaagccagaggagaa

SEQ ID NO: 31988 - RNA, 21 nt, Artificial Sequence
  GATA2 Guide RNA
gagccaaagccagaguggcca

SEQ ID NO: 31989 - RNA, 21 nt, Artificial Sequence
  GATA2 Guide RNA
gagcccuggcaaguggacccg

SEQ ID NO: 31990 - RNA, 21 nt, Artificial Sequence
  GATA2 Guide RNA
gagcuggugccugcuuugacg

SEQ ID NO: 31991 - RNA, 21 nt, Artificial Sequence
  GATA2 Guide RNA
gagcugucccaaguccuccgg

SEQ ID NO: 31992 - RNA, 21 nt, Artificial Sequence
  GATA2 Guide RNA
gaggaagaaccggaggacuug

SEQ ID NO: 31993 - RNA, 21 nt, Artificial Sequence
  GATA2 Guide RNA
gaggacuugggacagcucaga

SEQ ID NO: 31994 - RNA, 21 nt, Artificial Sequence
  GATA2 Guide RNA
gaggagaagagggugcaggcu

SEQ ID NO: 31995 - RNA, 21 nt, Artificial Sequence
  GATA2 Guide RNA
gagggaagccagaggagaaga

SEQ ID NO: 31996 - RNA, 21 nt, Artificial Sequence
  GATA2 Guide RNA
gagggugagcuggugccugcu

SEQ ID NO: 31997 - RNA, 21 nt, Artificial Sequence
  GATA2 Guide RNA
gagggugcaggcugagguccc

SEQ ID NO: 31998 - RNA, 21 nt, Artificial Sequence
  GATA2 Guide RNA
gagguccccacaaaucugccc

SEQ ID NO: 31999 - RNA, 21 nt, Artificial Sequence
  GATA2 Guide RNA
gaguggccacggcccagggag

SEQ ID NO: 32000 - RNA, 21 nt, Artificial Sequence
  GATA2 Guide RNA
gaguucggcuauuucagagag

SEQ ID NO: 32001 - RNA, 21 nt, Artificial Sequence
  GATA2 Guide RNA
gauuggcggguccacuugcca

SEQ ID NO: 32002 - RNA, 21 nt, Artificial Sequence
  GATA2 Guide RNA
gauuuguggggaccucagccu

SEQ ID NO: 32003 - RNA, 21 nt, Artificial Sequence
  GATA2 Guide RNA
gcaaguggacccgccaauccc

SEQ ID NO: 32004 - RNA, 21 nt, Artificial Sequence
  GATA2 Guide RNA
gcaccagcucacccucccugg

SEQ ID NO: 32005 - RNA, 21 nt, Artificial Sequence
  GATA2 Guide RNA
gcacccucuucuccucuggcu

SEQ ID NO: 32006 - RNA, 21 nt, Artificial Sequence
  GATA2 Guide RNA
gcagauuuguggggaccucag

SEQ ID NO: 32007 - RNA, 21 nt, Artificial Sequence
  GATA2 Guide RNA
gcaggcaccagcucacccucc

SEQ ID NO: 32008 - RNA, 21 nt, Artificial Sequence
  GATA2 Guide RNA
gcaggcugagguccccacaaa

SEQ ID NO: 32009 - RNA, 21 nt, Artificial Sequence
  GATA2 Guide RNA
gccaaagccagaguggccacg

SEQ ID NO: 32010 - RNA, 21 nt, Artificial Sequence
  GATA2 Guide RNA
gccaaucccgaggaagaaccg

SEQ ID NO: 32011 - RNA, 21 nt, Artificial Sequence
  GATA2 Guide RNA
gccacggcccagggaggguga

SEQ ID NO: 32012 - RNA, 21 nt, Artificial Sequence
  GATA2 Guide RNA
gccacucuggcuuuggcucag

SEQ ID NO: 32013 - RNA, 21 nt, Artificial Sequence
  GATA2 Guide RNA
gccagaggagaagagggugca

SEQ ID NO: 32014 - RNA, 21 nt, Artificial Sequence
  GATA2 Guide RNA
gccagaguggccacggcccag

SEQ ID NO: 32015 - RNA, 21 nt, Artificial Sequence
  GATA2 Guide RNA
gccagggcucugggggcagau

SEQ ID NO: 32016 - RNA, 21 nt, Artificial Sequence
  GATA2 Guide RNA
gcccagccuggaguucggcua

SEQ ID NO: 32017 - RNA, 21 nt, Artificial Sequence
  GATA2 Guide RNA
gcccccagagcccuggcaagu

SEQ ID NO: 32018 - RNA, 21 nt, Artificial Sequence
  GATA2 Guide RNA
gcccgucaaagcaggcaccag

SEQ ID NO: 32019 - RNA, 21 nt, Artificial Sequence
  GATA2 Guide RNA
gcccuggcaaguggacccgcc

SEQ ID NO: 32020 - RNA, 21 nt, Artificial Sequence
  GATA2 Guide RNA
gccgaacuccaggcugggcug

SEQ ID NO: 32021 - RNA, 21 nt, Artificial Sequence
  GATA2 Guide RNA
gccguggccacucuggcuuug

SEQ ID NO: 32022 - RNA, 21 nt, Artificial Sequence
  GATA2 Guide RNA
gccugcacccucuucuccucu

SEQ ID NO: 32023 - RNA, 21 nt, Artificial Sequence
  GATA2 Guide RNA
gccugcuuugacgggccaggc

SEQ ID NO: 32024 - RNA, 21 nt, Artificial Sequence
  GATA2 Guide RNA
gccuggaguucggcuauuuca

SEQ ID NO: 32025 - RNA, 21 nt, Artificial Sequence
  GATA2 Guide RNA
gccuggcccgucaaagcaggc

SEQ ID NO: 32026 - RNA, 21 nt, Artificial Sequence
  GATA2 Guide RNA
gcggguccacuugccagggcu

SEQ ID NO: 32027 - RNA, 21 nt, Artificial Sequence
  GATA2 Guide RNA
gcuauuucagagagggaagcc

SEQ ID NO: 32028 - RNA, 21 nt, Artificial Sequence
  GATA2 Guide RNA
gcucacccucccugggccgug

SEQ ID NO: 32029 - RNA, 21 nt, Artificial Sequence
  GATA2 Guide RNA
gcucagaccaccaagucucca

SEQ ID NO: 32030 - RNA, 21 nt, Artificial Sequence
  GATA2 Guide RNA
gcucagcccagccuggaguuc

SEQ ID NO: 32031 - RNA, 21 nt, Artificial Sequence
  GATA2 Guide RNA
gcucugggggcagauuugugg

SEQ ID NO: 32032 - RNA, 21 nt, Artificial Sequence
  GATA2 Guide RNA
gcucuuguuucuaacaaggac

SEQ ID NO: 32033 - RNA, 21 nt, Artificial Sequence
  GATA2 Guide RNA
gcugagccaaagccagagugg

SEQ ID NO: 32034 - RNA, 21 nt, Artificial Sequence
  GATA2 Guide RNA
gcugagguccccacaaaucug

SEQ ID NO: 32035 - RNA, 21 nt, Artificial Sequence
  GATA2 Guide RNA
gcugggcugagccaaagccag

SEQ ID NO: 32036 - RNA, 21 nt, Artificial Sequence
  GATA2 Guide RNA
gcuggugccugcuuugacggg

SEQ ID NO: 32037 - RNA, 21 nt, Artificial Sequence
  GATA2 Guide RNA
gcugucccaaguccuccgguu

SEQ ID NO: 32038 - RNA, 21 nt, Artificial Sequence
  GATA2 Guide RNA
gcuucccucucugaaauagcc

SEQ ID NO: 32039 - RNA, 21 nt, Artificial Sequence
  GATA2 Guide RNA
gcuuugacgggccaggcccug

SEQ ID NO: 32040 - RNA, 21 nt, Artificial Sequence
  GATA2 Guide RNA
gcuuuggcucagcccagccug

SEQ ID NO: 32041 - RNA, 21 nt, Artificial Sequence
  GATA2 Guide RNA
ggaaaaaggauuaggcaaaaa

SEQ ID NO: 32042 - RNA, 21 nt, Artificial Sequence
  GATA2 Guide RNA
ggaagaaccggaggacuuggg

SEQ ID NO: 32043 - RNA, 21 nt, Artificial Sequence
  GATA2 Guide RNA
ggaagccagaggagaagaggg

SEQ ID NO: 32044 - RNA, 21 nt, Artificial Sequence
  GATA2 Guide RNA
ggacagcucagaccaccaagu

SEQ ID NO: 32045 - RNA, 21 nt, Artificial Sequence
  GATA2 Guide RNA
ggacccgccaaucccgaggaa

SEQ ID NO: 32046 - RNA, 21 nt, Artificial Sequence
  GATA2 Guide RNA
ggaccucagccugcacccucu

SEQ ID NO: 32047 - RNA, 21 nt, Artificial Sequence
  GATA2 Guide RNA
ggacuuggagacuuggugguc

SEQ ID NO: 32048 - RNA, 21 nt, Artificial Sequence
  GATA2 Guide RNA
ggacuugggacagcucagacc

SEQ ID NO: 32049 - RNA, 21 nt, Artificial Sequence
  GATA2 Guide RNA
ggagaagagggugcaggcuga

SEQ ID NO: 32050 - RNA, 21 nt, Artificial Sequence
  GATA2 Guide RNA
ggagacuugguggucugagcu

SEQ ID NO: 32051 - RNA, 21 nt, Artificial Sequence
  GATA2 Guide RNA
ggaggacuugggacagcucag

SEQ ID NO: 32052 - RNA, 21 nt, Artificial Sequence
  GATA2 Guide RNA
ggagggugagcuggugccugc

SEQ ID NO: 32053 - RNA, 21 nt, Artificial Sequence
  GATA2 Guide RNA
ggaguucggcuauuucagaga

SEQ ID NO: 32054 - RNA, 21 nt, Artificial Sequence
  GATA2 Guide RNA
ggauuggcggguccacuugcc

SEQ ID NO: 32055 - RNA, 21 nt, Artificial Sequence
  GATA2 Guide RNA
ggcaaguggacccgccaaucc

SEQ ID NO: 32056 - RNA, 21 nt, Artificial Sequence
  GATA2 Guide RNA
ggcaccagcucacccucccug

SEQ ID NO: 32057 - RNA, 21 nt, Artificial Sequence
  GATA2 Guide RNA
ggcagauuuguggggaccuca

SEQ ID NO: 32058 - RNA, 21 nt, Artificial Sequence
  GATA2 Guide RNA
ggccacucuggcuuuggcuca

SEQ ID NO: 32059 - RNA, 21 nt, Artificial Sequence
  GATA2 Guide RNA
ggccaggcccuggagggcaga

SEQ ID NO: 32060 - RNA, 21 nt, Artificial Sequence
  GATA2 Guide RNA
ggcccgucaaagcaggcacca

SEQ ID NO: 32061 - RNA, 21 nt, Artificial Sequence
  GATA2 Guide RNA
ggccguggccacucuggcuuu

SEQ ID NO: 32062 - RNA, 21 nt, Artificial Sequence
  GATA2 Guide RNA
ggccuggcccgucaaagcagg

SEQ ID NO: 32063 - RNA, 21 nt, Artificial Sequence
  GATA2 Guide RNA
ggcggguccacuugccagggc

SEQ ID NO: 32064 - RNA, 21 nt, Artificial Sequence
  GATA2 Guide RNA
ggcuauuucagagagggaagc

SEQ ID NO: 32065 - RNA, 21 nt, Artificial Sequence
  GATA2 Guide RNA
ggcucagcccagccuggaguu

SEQ ID NO: 32066 - RNA, 21 nt, Artificial Sequence
  GATA2 Guide RNA
ggcucugggggcagauuugug

SEQ ID NO: 32067 - RNA, 21 nt, Artificial Sequence
  GATA2 Guide RNA
ggcugagccaaagccagagug

SEQ ID NO: 32068 - RNA, 21 nt, Artificial Sequence
  GATA2 Guide RNA
ggcugagguccccacaaaucu

SEQ ID NO: 32069 - RNA, 21 nt, Artificial Sequence
  GATA2 Guide RNA
ggcugggcugagccaaagcca

SEQ ID NO: 32070 - RNA, 21 nt, Artificial Sequence
  GATA2 Guide RNA
ggcuucccucucugaaauagc

SEQ ID NO: 32071 - RNA, 21 nt, Artificial Sequence
  GATA2 Guide RNA
ggcuuuggcucagcccagccu

SEQ ID NO: 32072 - RNA, 21 nt, Artificial Sequence
  GATA2 Guide RNA
gggaagccagaggagaagagg

SEQ ID NO: 32073 - RNA, 21 nt, Artificial Sequence
  GATA2 Guide RNA
gggacagcucagaccaccaag

SEQ ID NO: 32074 - RNA, 21 nt, Artificial Sequence
  GATA2 Guide RNA
gggaccucagccugcacccuc

SEQ ID NO: 32075 - RNA, 21 nt, Artificial Sequence
  GATA2 Guide RNA
gggagggugagcuggugccug

SEQ ID NO: 32076 - RNA, 21 nt, Artificial Sequence
  GATA2 Guide RNA
gggauuggcggguccacuugc

SEQ ID NO: 32077 - RNA, 21 nt, Artificial Sequence
  GATA2 Guide RNA
gggcagauuuguggggaccuc

SEQ ID NO: 32078 - RNA, 21 nt, Artificial Sequence
  GATA2 Guide RNA
gggccguggccacucuggcuu

SEQ ID NO: 32079 - RNA, 21 nt, Artificial Sequence
  GATA2 Guide RNA
gggcucugggggcagauuugu

SEQ ID NO: 32080 - RNA, 21 nt, Artificial Sequence
  GATA2 Guide RNA
gggcugagccaaagccagagu

SEQ ID NO: 32081 - RNA, 21 nt, Artificial Sequence
  GATA2 Guide RNA
ggggaccucagccugcacccu

SEQ ID NO: 32082 - RNA, 21 nt, Artificial Sequence
  GATA2 Guide RNA
ggggcagauuuguggggaccu

SEQ ID NO: 32083 - RNA, 21 nt, Artificial Sequence
  GATA2 Guide RNA
gggggcagauuuguggggacc

SEQ ID NO: 32084 - RNA, 21 nt, Artificial Sequence
  GATA2 Guide RNA
ggguccacuugccagggcucu

SEQ ID NO: 32085 - RNA, 21 nt, Artificial Sequence
  GATA2 Guide RNA
gggugagcuggugccugcuuu

SEQ ID NO: 32086 - RNA, 21 nt, Artificial Sequence
  GATA2 Guide RNA
gggugcaggcugaggucccca

SEQ ID NO: 32087 - RNA, 21 nt, Artificial Sequence
  GATA2 Guide RNA
gguccacuugccagggcucug

SEQ ID NO: 32088 - RNA, 21 nt, Artificial Sequence
  GATA2 Guide RNA
gguccccacaaaucugccccc

SEQ ID NO: 32089 - RNA, 21 nt, Artificial Sequence
  GATA2 Guide RNA
ggucugagcugucccaagucc

SEQ ID NO: 32090 - RNA, 21 nt, Artificial Sequence
  GATA2 Guide RNA
ggugagcuggugccugcuuug

SEQ ID NO: 32091 - RNA, 21 nt, Artificial Sequence
  GATA2 Guide RNA
ggugcaggcugagguccccac

SEQ ID NO: 32092 - RNA, 21 nt, Artificial Sequence
  GATA2 Guide RNA
ggugccugcuuugacgggcca

SEQ ID NO: 32093 - RNA, 21 nt, Artificial Sequence
  GATA2 Guide RNA
gguggucugagcugucccaag

SEQ ID NO: 32094 - RNA, 21 nt, Artificial Sequence
  GATA2 Guide RNA
gguucuuccucgggauuggcg

SEQ ID NO: 32095 - RNA, 21 nt, Artificial Sequence
  GATA2 Guide RNA
gucaaagcaggcaccagcuca

SEQ ID NO: 32096 - RNA, 21 nt, Artificial Sequence
  GATA2 Guide RNA
guccacuugccagggcucugg

SEQ ID NO: 32097 - RNA, 21 nt, Artificial Sequence
  GATA2 Guide RNA
gucccaaguccuccgguucuu

SEQ ID NO: 32098 - RNA, 21 nt, Artificial Sequence
  GATA2 Guide RNA
guccccacaaaucugccccca

SEQ ID NO: 32099 - RNA, 21 nt, Artificial Sequence
  GATA2 Guide RNA
guccuccgguucuuccucggg

SEQ ID NO: 32100 - RNA, 21 nt, Artificial Sequence
  GATA2 Guide RNA
guccuuguuagaaacaagagc

SEQ ID NO: 32101 - RNA, 21 nt, Artificial Sequence
  GATA2 Guide RNA
gucuccaaguccuuguuagaa

SEQ ID NO: 32102 - RNA, 21 nt, Artificial Sequence
  GATA2 Guide RNA
gucucugcccuccagggccug

SEQ ID NO: 32103 - RNA, 21 nt, Artificial Sequence
  GATA2 Guide RNA
gucugagcugucccaaguccu

SEQ ID NO: 32104 - RNA, 21 nt, Artificial Sequence
  GATA2 Guide RNA
gugagcuggugccugcuuuga

SEQ ID NO: 32105 - RNA, 21 nt, Artificial Sequence
  GATA2 Guide RNA
gugcaggcugagguccccaca

SEQ ID NO: 32106 - RNA, 21 nt, Artificial Sequence
  GATA2 Guide RNA
gugccugcuuugacgggccag

SEQ ID NO: 32107 - RNA, 21 nt, Artificial Sequence
  GATA2 Guide RNA
guggacccgccaaucccgagg

SEQ ID NO: 32108 - RNA, 21 nt, Artificial Sequence
  GATA2 Guide RNA
guggccacucuggcuuuggcu

SEQ ID NO: 32109 - RNA, 21 nt, Artificial Sequence
  GATA2 Guide RNA
guggggaccucagccugcacc

SEQ ID NO: 32110 - RNA, 21 nt, Artificial Sequence
  GATA2 Guide RNA
guggucugagcugucccaagu

SEQ ID NO: 32111 - RNA, 21 nt, Artificial Sequence
  GATA2 Guide RNA
guucggcuauuucagagaggg

SEQ ID NO: 32112 - RNA, 21 nt, Artificial Sequence
  GATA2 Guide RNA
guucuuccucgggauuggcgg

SEQ ID NO: 32113 - RNA, 21 nt, Artificial Sequence
  GATA2 Guide RNA
guuucuaacaaggacuuggag

SEQ ID NO: 32114 - RNA, 21 nt, Artificial Sequence
  GATA2 Guide RNA
uaacaaggacuuggagacuug

SEQ ID NO: 32115 - RNA, 21 nt, Artificial Sequence
  GATA2 Guide RNA
uagaaggaaaaaggauuaggc

SEQ ID NO: 32116 - RNA, 21 nt, Artificial Sequence
  GATA2 Guide RNA
uagccgaacuccaggcugggc

SEQ ID NO: 32117 - RNA, 21 nt, Artificial Sequence
  GATA2 Guide RNA
uauuucagagagggaagccag

SEQ ID NO: 32118 - RNA, 21 nt, Artificial Sequence
  GATA2 Guide RNA
ucaaagcaggcaccagcucac

SEQ ID NO: 32119 - RNA, 21 nt, Artificial Sequence
  GATA2 Guide RNA
ucacccucccugggccguggc

SEQ ID NO: 32120 - RNA, 21 nt, Artificial Sequence
  GATA2 Guide RNA
ucagaccaccaagucuccaag

SEQ ID NO: 32121 - RNA, 21 nt, Artificial Sequence
  GATA2 Guide RNA
ucagagagggaagccagagga

SEQ ID NO: 32122 - RNA, 21 nt, Artificial Sequence
  GATA2 Guide RNA
ucagcccagccuggaguucgg

SEQ ID NO: 32123 - RNA, 21 nt, Artificial Sequence
  GATA2 Guide RNA
ucagccugcacccucuucucc

SEQ ID NO: 32124 - RNA, 21 nt, Artificial Sequence
  GATA2 Guide RNA
uccaaguccuuguuagaaaca

SEQ ID NO: 32125 - RNA, 21 nt, Artificial Sequence
  GATA2 Guide RNA
uccacuugccagggcucuggg

SEQ ID NO: 32126 - RNA, 21 nt, Artificial Sequence
  GATA2 Guide RNA
uccaggcugggcugagccaaa

SEQ ID NO: 32127 - RNA, 21 nt, Artificial Sequence
  GATA2 Guide RNA
uccagggccuggcccgucaaa

SEQ ID NO: 32128 - RNA, 21 nt, Artificial Sequence
  GATA2 Guide RNA
ucccaaguccuccgguucuuc

SEQ ID NO: 32129 - RNA, 21 nt, Artificial Sequence
  GATA2 Guide RNA
uccccacaaaucugcccccag

SEQ ID NO: 32130 - RNA, 21 nt, Artificial Sequence
  GATA2 Guide RNA
ucccgaggaagaaccggagga

SEQ ID NO: 32131 - RNA, 21 nt, Artificial Sequence
  GATA2 Guide RNA
ucccucucugaaauagccgaa

SEQ ID NO: 32132 - RNA, 21 nt, Artificial Sequence
  GATA2 Guide RNA
ucccugggccguggccacucu

SEQ ID NO: 32133 - RNA, 21 nt, Artificial Sequence
  GATA2 Guide RNA
uccuccgguucuuccucggga

SEQ ID NO: 32134 - RNA, 21 nt, Artificial Sequence
  GATA2 Guide RNA
uccucgggauuggcgggucca

SEQ ID NO: 32135 - RNA, 21 nt, Artificial Sequence
  GATA2 Guide RNA
uccucuggcuucccucucuga

SEQ ID NO: 32136 - RNA, 21 nt, Artificial Sequence
  GATA2 Guide RNA
uccuuguuagaaacaagagca

SEQ ID NO: 32137 - RNA, 21 nt, Artificial Sequence
  GATA2 Guide RNA
ucggcuauuucagagagggaa

SEQ ID NO: 32138 - RNA, 21 nt, Artificial Sequence
  GATA2 Guide RNA
ucgggauuggcggguccacuu

SEQ ID NO: 32139 - RNA, 21 nt, Artificial Sequence
  GATA2 Guide RNA
ucuaacaaggacuuggagacu

SEQ ID NO: 32140 - RNA, 21 nt, Artificial Sequence
  GATA2 Guide RNA
ucuccaaguccuuguuagaaa

SEQ ID NO: 32141 - RNA, 21 nt, Artificial Sequence
  GATA2 Guide RNA
ucuccucuggcuucccucucu

SEQ ID NO: 32142 - RNA, 21 nt, Artificial Sequence
  GATA2 Guide RNA
ucucugaaauagccgaacucc

SEQ ID NO: 32143 - RNA, 21 nt, Artificial Sequence
  GATA2 Guide RNA
ucucugcccuccagggccugg

SEQ ID NO: 32144 - RNA, 21 nt, Artificial Sequence
  GATA2 Guide RNA
ucugaaauagccgaacuccag

SEQ ID NO: 32145 - RNA, 21 nt, Artificial Sequence
  GATA2 Guide RNA
ucugagcugucccaaguccuc

SEQ ID NO: 32146 - RNA, 21 nt, Artificial Sequence
  GATA2 Guide RNA
ucugcccccagagcccuggca

SEQ ID NO: 32147 - RNA, 21 nt, Artificial Sequence
  GATA2 Guide RNA
ucugcccuccagggccuggcc

SEQ ID NO: 32148 - RNA, 21 nt, Artificial Sequence
  GATA2 Guide RNA
ucuggcuucccucucugaaau

SEQ ID NO: 32149 - RNA, 21 nt, Artificial Sequence
  GATA2 Guide RNA
ucuggcuuuggcucagcccag

SEQ ID NO: 32150 - RNA, 21 nt, Artificial Sequence
  GATA2 Guide RNA
ucugggggcagauuugugggg

SEQ ID NO: 32151 - RNA, 21 nt, Artificial Sequence
  GATA2 Guide RNA
ucuuccucgggauuggcgggu

SEQ ID NO: 32152 - RNA, 21 nt, Artificial Sequence
  GATA2 Guide RNA
ucuucuccucuggcuucccuc

SEQ ID NO: 32153 - RNA, 21 nt, Artificial Sequence
  GATA2 Guide RNA
ucuuguuucuaacaaggacuu

SEQ ID NO: 32154 - RNA, 21 nt, Artificial Sequence
  GATA2 Guide RNA
ugaaauagccgaacuccaggc

SEQ ID NO: 32155 - RNA, 21 nt, Artificial Sequence
  GATA2 Guide RNA
ugacgggccaggcccuggagg

SEQ ID NO: 32156 - RNA, 21 nt, Artificial Sequence
  GATA2 Guide RNA
ugagccaaagccagaguggcc

SEQ ID NO: 32157 - RNA, 21 nt, Artificial Sequence
  GATA2 Guide RNA
ugagcuggugccugcuuugac

SEQ ID NO: 32158 - RNA, 21 nt, Artificial Sequence
  GATA2 Guide RNA
ugagcugucccaaguccuccg

SEQ ID NO: 32159 - RNA, 21 nt, Artificial Sequence
  GATA2 Guide RNA
ugagguccccacaaaucugcc

SEQ ID NO: 32160 - RNA, 21 nt, Artificial Sequence
  GATA2 Guide RNA
ugcacccucuucuccucuggc

SEQ ID NO: 32161 - RNA, 21 nt, Artificial Sequence
  GATA2 Guide RNA
ugcaggcugagguccccacaa

SEQ ID NO: 32162 - RNA, 21 nt, Artificial Sequence
  GATA2 Guide RNA
ugccagggcucugggggcaga

SEQ ID NO: 32163 - RNA, 21 nt, Artificial Sequence
  GATA2 Guide RNA
ugcccccagagcccuggcaag

SEQ ID NO: 32164 - RNA, 21 nt, Artificial Sequence
  GATA2 Guide RNA
ugccuaauccuuuuuccuucu

SEQ ID NO: 32165 - RNA, 21 nt, Artificial Sequence
  GATA2 Guide RNA
ugccugcuuugacgggccagg

SEQ ID NO: 32166 - RNA, 21 nt, Artificial Sequence
  GATA2 Guide RNA
ugcucuuguuucuaacaagga

SEQ ID NO: 32167 - RNA, 21 nt, Artificial Sequence
  GATA2 Guide RNA
ugcuuugacgggccaggcccu

SEQ ID NO: 32168 - RNA, 21 nt, Artificial Sequence
  GATA2 Guide RNA
uggacccgccaaucccgagga

SEQ ID NO: 32169 - RNA, 21 nt, Artificial Sequence
  GATA2 Guide RNA
uggagacuugguggucugagc

SEQ ID NO: 32170 - RNA, 21 nt, Artificial Sequence
  GATA2 Guide RNA
uggaguucggcuauuucagag

SEQ ID NO: 32171 - RNA, 21 nt, Artificial Sequence
  GATA2 Guide RNA
uggcaaguggacccgccaauc

SEQ ID NO: 32172 - RNA, 21 nt, Artificial Sequence
  GATA2 Guide RNA
uggccacggcccagggagggu

SEQ ID NO: 32173 - RNA, 21 nt, Artificial Sequence
  GATA2 Guide RNA
uggccacucuggcuuuggcuc

SEQ ID NO: 32174 - RNA, 21 nt, Artificial Sequence
  GATA2 Guide RNA
uggcccgucaaagcaggcacc

SEQ ID NO: 32175 - RNA, 21 nt, Artificial Sequence
  GATA2 Guide RNA
uggcggguccacuugccaggg

SEQ ID NO: 32176 - RNA, 21 nt, Artificial Sequence
  GATA2 Guide RNA
uggcucagcccagccuggagu

SEQ ID NO: 32177 - RNA, 21 nt, Artificial Sequence
  GATA2 Guide RNA
uggcuucccucucugaaauag

SEQ ID NO: 32178 - RNA, 21 nt, Artificial Sequence
  GATA2 Guide RNA
uggcuuuggcucagcccagcc

SEQ ID NO: 32179 - RNA, 21 nt, Artificial Sequence
  GATA2 Guide RNA
ugggacagcucagaccaccaa

SEQ ID NO: 32180 - RNA, 21 nt, Artificial Sequence
  GATA2 Guide RNA
ugggccguggccacucuggcu

SEQ ID NO: 32181 - RNA, 21 nt, Artificial Sequence
  GATA2 Guide RNA
ugggcugagccaaagccagag

SEQ ID NO: 32182 - RNA, 21 nt, Artificial Sequence
  GATA2 Guide RNA
uggggaccucagccugcaccc

SEQ ID NO: 32183 - RNA, 21 nt, Artificial Sequence
  GATA2 Guide RNA
ugggggcagauuuguggggac

SEQ ID NO: 32184 - RNA, 21 nt, Artificial Sequence
  GATA2 Guide RNA
uggucugagcugucccaaguc

SEQ ID NO: 32185 - RNA, 21 nt, Artificial Sequence
  GATA2 Guide RNA
uggugccugcuuugacgggcc

SEQ ID NO: 32186 - RNA, 21 nt, Artificial Sequence
  GATA2 Guide RNA
ugguggucugagcugucccaa

SEQ ID NO: 32187 - RNA, 21 nt, Artificial Sequence
  GATA2 Guide RNA
ugucccaaguccuccgguucu

SEQ ID NO: 32188 - RNA, 21 nt, Artificial Sequence
  GATA2 Guide RNA
ugucucugcccuccagggccu

SEQ ID NO: 32189 - RNA, 21 nt, Artificial Sequence
  GATA2 Guide RNA
uguggggaccucagccugcac

SEQ ID NO: 32190 - RNA, 21 nt, Artificial Sequence
  GATA2 Guide RNA
uguuucuaacaaggacuugga

SEQ ID NO: 32191 - RNA, 21 nt, Artificial Sequence
  GATA2 Guide RNA
uuagaaggaaaaaggauuagg

SEQ ID NO: 32192 - RNA, 21 nt, Artificial Sequence
  GATA2 Guide RNA
uucagagagggaagccagagg

SEQ ID NO: 32193 - RNA, 21 nt, Artificial Sequence
  GATA2 Guide RNA
uucccucucugaaauagccga

SEQ ID NO: 32194 - RNA, 21 nt, Artificial Sequence
  GATA2 Guide RNA
uuccucgggauuggcgggucc

SEQ ID NO: 32195 - RNA, 21 nt, Artificial Sequence
  GATA2 Guide RNA
uucggcuauuucagagaggga

SEQ ID NO: 32196 - RNA, 21 nt, Artificial Sequence
  GATA2 Guide RNA
uucuaacaaggacuuggagac

SEQ ID NO: 32197 - RNA, 21 nt, Artificial Sequence
  GATA2 Guide RNA
uucuccucuggcuucccucuc

SEQ ID NO: 32198 - RNA, 21 nt, Artificial Sequence
  GATA2 Guide RNA
uucuuccucgggauuggcggg

SEQ ID NO: 32199 - RNA, 21 nt, Artificial Sequence
  GATA2 Guide RNA
uugacgggccaggcccuggag

SEQ ID NO: 32200 - RNA, 21 nt, Artificial Sequence
  GATA2 Guide RNA
uugccagggcucugggggcag

SEQ ID NO: 32201 - RNA, 21 nt, Artificial Sequence
  GATA2 Guide RNA
uugccuaauccuuuuuccuuc

SEQ ID NO: 32202 - RNA, 21 nt, Artificial Sequence
  GATA2 Guide RNA
uugcucuuguuucuaacaagg

SEQ ID NO: 32203 - RNA, 21 nt, Artificial Sequence
  GATA2 Guide RNA
uuggagacuugguggucugag

SEQ ID NO: 32204 - RNA, 21 nt, Artificial Sequence
  GATA2 Guide RNA
uuggcggguccacuugccagg

SEQ ID NO: 32205 - RNA, 21 nt, Artificial Sequence
  GATA2 Guide RNA
uuggcucagcccagccuggag

SEQ ID NO: 32206 - RNA, 21 nt, Artificial Sequence
  GATA2 Guide RNA
uugggacagcucagaccacca

SEQ ID NO: 32207 - RNA, 21 nt, Artificial Sequence
  GATA2 Guide RNA
uugguggucugagcuguccca

SEQ ID NO: 32208 - RNA, 21 nt, Artificial Sequence
  GATA2 Guide RNA
uuguggggaccucagccugca

SEQ ID NO: 32209 - RNA, 21 nt, Artificial Sequence
  GATA2 Guide RNA
uuguuucuaacaaggacuugg

SEQ ID NO: 32210 - RNA, 21 nt, Artificial Sequence
  GATA2 Guide RNA
uuucagagagggaagccagag

SEQ ID NO: 32211 - RNA, 21 nt, Artificial Sequence
  GATA2 Guide RNA
uuucuaacaaggacuuggaga

SEQ ID NO: 32212 - RNA, 21 nt, Artificial Sequence
  GATA2 Guide RNA
uuugacgggccaggcccugga

SEQ ID NO: 32213 - RNA, 21 nt, Artificial Sequence
  GATA2 Guide RNA
uuugccuaauccuuuuuccuu

SEQ ID NO: 32214 - RNA, 21 nt, Artificial Sequence
  GATA2 Guide RNA
uuugcucuuguuucuaacaag

SEQ ID NO: 32215 - RNA, 21 nt, Artificial Sequence
  GATA2 Guide RNA
uuuggcucagcccagccugga

SEQ ID NO: 32216 - RNA, 21 nt, Artificial Sequence
  GATA2 Guide RNA
uuuguggggaccucagccugc

SEQ ID NO: 32217 - RNA, 21 nt, Artificial Sequence
  GATA2 Guide RNA
uuuugccuaauccuuuuuccu

SEQ ID NO: 32218 - RNA, 21 nt, Artificial Sequence
  GATA2 Guide RNA
uuuuugccuaauccuuuuucc

SEQ ID NO: 32219 - RNA, 22 nt, Artificial Sequence
  GATA2 Guide RNA
aaagcaggcaccagcucacccu

SEQ ID NO: 32220 - RNA, 22 nt, Artificial Sequence
  GATA2 Guide RNA
aaagccagaguggccacggccc

SEQ ID NO: 32221 - RNA, 22 nt, Artificial Sequence
  GATA2 Guide RNA
aaauagccgaacuccaggcugg

SEQ ID NO: 32222 - RNA, 22 nt, Artificial Sequence
  GATA2 Guide RNA
aaaucugcccccagagcccugg

SEQ ID NO: 32223 - RNA, 22 nt, Artificial Sequence
  GATA2 Guide RNA
aacaaggacuuggagacuuggu

SEQ ID NO: 32224 - RNA, 22 nt, Artificial Sequence
  GATA2 Guide RNA
aaccggaggacuugggacagcu

SEQ ID NO: 32225 - RNA, 22 nt, Artificial Sequence
  GATA2 Guide RNA
aacuccaggcugggcugagcca

SEQ ID NO: 32226 - RNA, 22 nt, Artificial Sequence
  GATA2 Guide RNA
aagaaccggaggacuugggaca

SEQ ID NO: 32227 - RNA, 22 nt, Artificial Sequence
  GATA2 Guide RNA
aagagggugcaggcugaggucc

SEQ ID NO: 32228 - RNA, 22 nt, Artificial Sequence
  GATA2 Guide RNA
aagcaggcaccagcucacccuc

SEQ ID NO: 32229 - RNA, 22 nt, Artificial Sequence
  GATA2 Guide RNA
aagccagaggagaagagggugc

SEQ ID NO: 32230 - RNA, 22 nt, Artificial Sequence
  GATA2 Guide RNA
aagccagaguggccacggccca

SEQ ID NO: 32231 - RNA, 22 nt, Artificial Sequence
  GATA2 Guide RNA
aaggaaaaaggauuaggcaaaa

SEQ ID NO: 32232 - RNA, 22 nt, Artificial Sequence
  GATA2 Guide RNA
aaggacuuggagacuugguggu

SEQ ID NO: 32233 - RNA, 22 nt, Artificial Sequence
  GATA2 Guide RNA
aaguccuccgguucuuccucgg

SEQ ID NO: 32234 - RNA, 22 nt, Artificial Sequence
  GATA2 Guide RNA
aaguccuuguuagaaacaagag

SEQ ID NO: 32235 - RNA, 22 nt, Artificial Sequence
  GATA2 Guide RNA
aagucuccaaguccuuguuaga

SEQ ID NO: 32236 - RNA, 22 nt, Artificial Sequence
  GATA2 Guide RNA
aaguggacccgccaaucccgag

SEQ ID NO: 32237 - RNA, 22 nt, Artificial Sequence
  GATA2 Guide RNA
aauagccgaacuccaggcuggg

SEQ ID NO: 32238 - RNA, 22 nt, Artificial Sequence
  GATA2 Guide RNA
aaucccgaggaagaaccggagg

SEQ ID NO: 32239 - RNA, 22 nt, Artificial Sequence
  GATA2 Guide RNA
aaucugcccccagagcccuggc

SEQ ID NO: 32240 - RNA, 22 nt, Artificial Sequence
  GATA2 Guide RNA
acaaaucugcccccagagcccu

SEQ ID NO: 32241 - RNA, 22 nt, Artificial Sequence
  GATA2 Guide RNA
acaaggacuuggagacuuggug

SEQ ID NO: 32242 - RNA, 22 nt, Artificial Sequence
  GATA2 Guide RNA
acagcucagaccaccaagucuc

SEQ ID NO: 32243 - RNA, 22 nt, Artificial Sequence
  GATA2 Guide RNA
accaagucuccaaguccuuguu

SEQ ID NO: 32244 - RNA, 22 nt, Artificial Sequence
  GATA2 Guide RNA
accaccaagucuccaaguccuu

SEQ ID NO: 32245 - RNA, 22 nt, Artificial Sequence
  GATA2 Guide RNA
accagcucacccucccugggcc

SEQ ID NO: 32246 - RNA, 22 nt, Artificial Sequence
  GATA2 Guide RNA
acccgccaaucccgaggaagaa

SEQ ID NO: 32247 - RNA, 22 nt, Artificial Sequence
  GATA2 Guide RNA
acccucccugggccguggccac

SEQ ID NO: 32248 - RNA, 22 nt, Artificial Sequence
  GATA2 Guide RNA
acccucuucuccucuggcuucc

SEQ ID NO: 32249 - RNA, 22 nt, Artificial Sequence
  GATA2 Guide RNA
accggaggacuugggacagcuc

SEQ ID NO: 32250 - RNA, 22 nt, Artificial Sequence
  GATA2 Guide RNA
accucagccugcacccucuucu

SEQ ID NO: 32251 - RNA, 22 nt, Artificial Sequence
  GATA2 Guide RNA
acgggccaggcccuggagggca

SEQ ID NO: 32252 - RNA, 22 nt, Artificial Sequence
  GATA2 Guide RNA
acuccaggcugggcugagccaa

SEQ ID NO: 32253 - RNA, 22 nt, Artificial Sequence
  GATA2 Guide RNA
acucuggcuuuggcucagccca

SEQ ID NO: 32254 - RNA, 22 nt, Artificial Sequence
  GATA2 Guide RNA
acuugccagggcucugggggca

SEQ ID NO: 32255 - RNA, 22 nt, Artificial Sequence
  GATA2 Guide RNA
acuuggagacuugguggucuga

SEQ ID NO: 32256 - RNA, 22 nt, Artificial Sequence
  GATA2 Guide RNA
acuugggacagcucagaccacc

SEQ ID NO: 32257 - RNA, 22 nt, Artificial Sequence
  GATA2 Guide RNA
acuugguggucugagcuguccc

SEQ ID NO: 32258 - RNA, 22 nt, Artificial Sequence
  GATA2 Guide RNA
agaaccggaggacuugggacag

SEQ ID NO: 32259 - RNA, 22 nt, Artificial Sequence
  GATA2 Guide RNA
agaagagggugcaggcugaggu

SEQ ID NO: 32260 - RNA, 22 nt, Artificial Sequence
  GATA2 Guide RNA
agaaggaaaaaggauuaggcaa

SEQ ID NO: 32261 - RNA, 22 nt, Artificial Sequence
  GATA2 Guide RNA
agaccaccaagucuccaagucc

SEQ ID NO: 32262 - RNA, 22 nt, Artificial Sequence
  GATA2 Guide RNA
agacuugguggucugagcuguc

SEQ ID NO: 32263 - RNA, 22 nt, Artificial Sequence
  GATA2 Guide RNA
agagagggaagccagaggagaa

SEQ ID NO: 32264 - RNA, 22 nt, Artificial Sequence
  GATA2 Guide RNA
agagcccuggcaaguggacccg

SEQ ID NO: 32265 - RNA, 22 nt, Artificial Sequence
  GATA2 Guide RNA
agaggagaagagggugcaggcu

SEQ ID NO: 32266 - RNA, 22 nt, Artificial Sequence
  GATA2 Guide RNA
agagggaagccagaggagaaga

SEQ ID NO: 32267 - RNA, 22 nt, Artificial Sequence
  GATA2 Guide RNA
agagggugcaggcugagguccc

SEQ ID NO: 32268 - RNA, 22 nt, Artificial Sequence
  GATA2 Guide RNA
agaguggccacggcccagggag

SEQ ID NO: 32269 - RNA, 22 nt, Artificial Sequence
  GATA2 Guide RNA
agauuuguggggaccucagccu

SEQ ID NO: 32270 - RNA, 22 nt, Artificial Sequence
  GATA2 Guide RNA
agcaggcaccagcucacccucc

SEQ ID NO: 32271 - RNA, 22 nt, Artificial Sequence
  GATA2 Guide RNA
agccaaagccagaguggccacg

SEQ ID NO: 32272 - RNA, 22 nt, Artificial Sequence
  GATA2 Guide RNA
agccagaggagaagagggugca

SEQ ID NO: 32273 - RNA, 22 nt, Artificial Sequence
  GATA2 Guide RNA
agccagaguggccacggcccag

SEQ ID NO: 32274 - RNA, 22 nt, Artificial Sequence
  GATA2 Guide RNA
agcccagccuggaguucggcua

SEQ ID NO: 32275 - RNA, 22 nt, Artificial Sequence
  GATA2 Guide RNA
agcccuggcaaguggacccgcc

SEQ ID NO: 32276 - RNA, 22 nt, Artificial Sequence
  GATA2 Guide RNA
agccgaacuccaggcugggcug

SEQ ID NO: 32277 - RNA, 22 nt, Artificial Sequence
  GATA2 Guide RNA
agccugcacccucuucuccucu

SEQ ID NO: 32278 - RNA, 22 nt, Artificial Sequence
  GATA2 Guide RNA
agccuggaguucggcuauuuca

SEQ ID NO: 32279 - RNA, 22 nt, Artificial Sequence
  GATA2 Guide RNA
agcucacccucccugggccgug

SEQ ID NO: 32280 - RNA, 22 nt, Artificial Sequence
  GATA2 Guide RNA
agcucagaccaccaagucucca

SEQ ID NO: 32281 - RNA, 22 nt, Artificial Sequence
  GATA2 Guide RNA
agcuggugccugcuuugacggg

SEQ ID NO: 32282 - RNA, 22 nt, Artificial Sequence
  GATA2 Guide RNA
agcugucccaaguccuccgguu

SEQ ID NO: 32283 - RNA, 22 nt, Artificial Sequence
  GATA2 Guide RNA
aggaaaaaggauuaggcaaaaa

SEQ ID NO: 32284 - RNA, 22 nt, Artificial Sequence
  GATA2 Guide RNA
aggaagaaccggaggacuuggg

SEQ ID NO: 32285 - RNA, 22 nt, Artificial Sequence
  GATA2 Guide RNA
aggacuuggagacuuggugguc

SEQ ID NO: 32286 - RNA, 22 nt, Artificial Sequence
  GATA2 Guide RNA
aggacuugggacagcucagacc

SEQ ID NO: 32287 - RNA, 22 nt, Artificial Sequence
  GATA2 Guide RNA
aggagaagagggugcaggcuga

SEQ ID NO: 32288 - RNA, 22 nt, Artificial Sequence
  GATA2 Guide RNA
aggcaccagcucacccucccug

SEQ ID NO: 32289 - RNA, 22 nt, Artificial Sequence
  GATA2 Guide RNA
aggcugagguccccacaaaucu

SEQ ID NO: 32290 - RNA, 22 nt, Artificial Sequence
  GATA2 Guide RNA
aggcugggcugagccaaagcca

SEQ ID NO: 32291 - RNA, 22 nt, Artificial Sequence
  GATA2 Guide RNA
agggaagccagaggagaagagg

SEQ ID NO: 32292 - RNA, 22 nt, Artificial Sequence
  GATA2 Guide RNA
agggagggugagcuggugccug

SEQ ID NO: 32293 - RNA, 22 nt, Artificial Sequence
  GATA2 Guide RNA
agggcucugggggcagauuugu

SEQ ID NO: 32294 - RNA, 22 nt, Artificial Sequence
  GATA2 Guide RNA
agggugagcuggugccugcuuu

SEQ ID NO: 32295 - RNA, 22 nt, Artificial Sequence
  GATA2 Guide RNA
agggugcaggcugaggucccca

SEQ ID NO: 32296 - RNA, 22 nt, Artificial Sequence
  GATA2 Guide RNA
agguccccacaaaucugccccc

SEQ ID NO: 32297 - RNA, 22 nt, Artificial Sequence
  GATA2 Guide RNA
aguccuccgguucuuccucggg

SEQ ID NO: 32298 - RNA, 22 nt, Artificial Sequence
  GATA2 Guide RNA
aguccuuguuagaaacaagagc

SEQ ID NO: 32299 - RNA, 22 nt, Artificial Sequence
  GATA2 Guide RNA
agucuccaaguccuuguuagaa

SEQ ID NO: 32300 - RNA, 22 nt, Artificial Sequence
  GATA2 Guide RNA
aguggacccgccaaucccgagg

SEQ ID NO: 32301 - RNA, 22 nt, Artificial Sequence
  GATA2 Guide RNA
aguggccacggcccagggaggg

SEQ ID NO: 32302 - RNA, 22 nt, Artificial Sequence
  GATA2 Guide RNA
aguucggcuauuucagagaggg

SEQ ID NO: 32303 - RNA, 22 nt, Artificial Sequence
  GATA2 Guide RNA
auagccgaacuccaggcugggc

SEQ ID NO: 32304 - RNA, 22 nt, Artificial Sequence
  GATA2 Guide RNA
aucccgaggaagaaccggagga

SEQ ID NO: 32305 - RNA, 22 nt, Artificial Sequence
  GATA2 Guide RNA
aucugcccccagagcccuggca

SEQ ID NO: 32306 - RNA, 22 nt, Artificial Sequence
  GATA2 Guide RNA
auuggcggguccacuugccagg

SEQ ID NO: 32307 - RNA, 22 nt, Artificial Sequence
  GATA2 Guide RNA
auuucagagagggaagccagag

SEQ ID NO: 32308 - RNA, 22 nt, Artificial Sequence
  GATA2 Guide RNA
auuuguggggaccucagccugc

SEQ ID NO: 32309 - RNA, 22 nt, Artificial Sequence
  GATA2 Guide RNA
auuuuugccuaauccuuuuucc

SEQ ID NO: 32310 - RNA, 22 nt, Artificial Sequence
  GATA2 Guide RNA
caaagcaggcaccagcucaccc

SEQ ID NO: 32311 - RNA, 22 nt, Artificial Sequence
  GATA2 Guide RNA
caaagccagaguggccacggcc

SEQ ID NO: 32312 - RNA, 22 nt, Artificial Sequence
  GATA2 Guide RNA
caaaucugcccccagagcccug

SEQ ID NO: 32313 - RNA, 22 nt, Artificial Sequence
  GATA2 Guide RNA
caaggacuuggagacuuggugg

SEQ ID NO: 32314 - RNA, 22 nt, Artificial Sequence
  GATA2 Guide RNA
caaguccuccgguucuuccucg

SEQ ID NO: 32315 - RNA, 22 nt, Artificial Sequence
  GATA2 Guide RNA
caaguccuuguuagaaacaaga

SEQ ID NO: 32316 - RNA, 22 nt, Artificial Sequence
  GATA2 Guide RNA
caagucuccaaguccuuguuag

SEQ ID NO: 32317 - RNA, 22 nt, Artificial Sequence
  GATA2 Guide RNA
caaguggacccgccaaucccga

SEQ ID NO: 32318 - RNA, 22 nt, Artificial Sequence
  GATA2 Guide RNA
caaucccgaggaagaaccggag

SEQ ID NO: 32319 - RNA, 22 nt, Artificial Sequence
  GATA2 Guide RNA
cacaaaucugcccccagagccc

SEQ ID NO: 32320 - RNA, 22 nt, Artificial Sequence
  GATA2 Guide RNA
caccaagucuccaaguccuugu

SEQ ID NO: 32321 - RNA, 22 nt, Artificial Sequence
  GATA2 Guide RNA
caccagcucacccucccugggc

SEQ ID NO: 32322 - RNA, 22 nt, Artificial Sequence
  GATA2 Guide RNA
cacccucccugggccguggcca

SEQ ID NO: 32323 - RNA, 22 nt, Artificial Sequence
  GATA2 Guide RNA
cacccucuucuccucuggcuuc

SEQ ID NO: 32324 - RNA, 22 nt, Artificial Sequence
  GATA2 Guide RNA
cacggcccagggagggugagcu

SEQ ID NO: 32325 - RNA, 22 nt, Artificial Sequence
  GATA2 Guide RNA
cacucuggcuuuggcucagccc

SEQ ID NO: 32326 - RNA, 22 nt, Artificial Sequence
  GATA2 Guide RNA
cacuugccagggcucugggggc

SEQ ID NO: 32327 - RNA, 22 nt, Artificial Sequence
  GATA2 Guide RNA
cagaccaccaagucuccaaguc

SEQ ID NO: 32328 - RNA, 22 nt, Artificial Sequence
  GATA2 Guide RNA
cagagagggaagccagaggaga

SEQ ID NO: 32329 - RNA, 22 nt, Artificial Sequence
  GATA2 Guide RNA
cagagcccuggcaaguggaccc

SEQ ID NO: 32330 - RNA, 22 nt, Artificial Sequence
  GATA2 Guide RNA
cagaggagaagagggugcaggc

SEQ ID NO: 32331 - RNA, 22 nt, Artificial Sequence
  GATA2 Guide RNA
cagaguggccacggcccaggga

SEQ ID NO: 32332 - RNA, 22 nt, Artificial Sequence
  GATA2 Guide RNA
cagauuuguggggaccucagcc

SEQ ID NO: 32333 - RNA, 22 nt, Artificial Sequence
  GATA2 Guide RNA
cagcccagccuggaguucggcu

SEQ ID NO: 32334 - RNA, 22 nt, Artificial Sequence
  GATA2 Guide RNA
cagccugcacccucuucuccuc

SEQ ID NO: 32335 - RNA, 22 nt, Artificial Sequence
  GATA2 Guide RNA
cagccuggaguucggcuauuuc

SEQ ID NO: 32336 - RNA, 22 nt, Artificial Sequence
  GATA2 Guide RNA
cagcucacccucccugggccgu

SEQ ID NO: 32337 - RNA, 22 nt, Artificial Sequence
  GATA2 Guide RNA
cagcucagaccaccaagucucc

SEQ ID NO: 32338 - RNA, 22 nt, Artificial Sequence
  GATA2 Guide RNA
caggcaccagcucacccucccu

SEQ ID NO: 32339 - RNA, 22 nt, Artificial Sequence
  GATA2 Guide RNA
caggcugagguccccacaaauc

SEQ ID NO: 32340 - RNA, 22 nt, Artificial Sequence
  GATA2 Guide RNA
caggcugggcugagccaaagcc

SEQ ID NO: 32341 - RNA, 22 nt, Artificial Sequence
  GATA2 Guide RNA
cagggagggugagcuggugccu

SEQ ID NO: 32342 - RNA, 22 nt, Artificial Sequence
  GATA2 Guide RNA
cagggcucugggggcagauuug

SEQ ID NO: 32343 - RNA, 22 nt, Artificial Sequence
  GATA2 Guide RNA
ccaaagccagaguggccacggc

SEQ ID NO: 32344 - RNA, 22 nt, Artificial Sequence
  GATA2 Guide RNA
ccaaguccuccgguucuuccuc

SEQ ID NO: 32345 - RNA, 22 nt, Artificial Sequence
  GATA2 Guide RNA
ccaaguccuuguuagaaacaag

SEQ ID NO: 32346 - RNA, 22 nt, Artificial Sequence
  GATA2 Guide RNA
ccaagucuccaaguccuuguua

SEQ ID NO: 32347 - RNA, 22 nt, Artificial Sequence
  GATA2 Guide RNA
ccaaucccgaggaagaaccgga

SEQ ID NO: 32348 - RNA, 22 nt, Artificial Sequence
  GATA2 Guide RNA
ccacaaaucugcccccagagcc

SEQ ID NO: 32349 - RNA, 22 nt, Artificial Sequence
  GATA2 Guide RNA
ccaccaagucuccaaguccuug

SEQ ID NO: 32350 - RNA, 22 nt, Artificial Sequence
  GATA2 Guide RNA
ccacggcccagggagggugagc

SEQ ID NO: 32351 - RNA, 22 nt, Artificial Sequence
  GATA2 Guide RNA
ccacucuggcuuuggcucagcc

SEQ ID NO: 32352 - RNA, 22 nt, Artificial Sequence
  GATA2 Guide RNA
ccacuugccagggcucuggggg

SEQ ID NO: 32353 - RNA, 22 nt, Artificial Sequence
  GATA2 Guide RNA
ccagaggagaagagggugcagg

SEQ ID NO: 32354 - RNA, 22 nt, Artificial Sequence
  GATA2 Guide RNA
ccagaguggccacggcccaggg

SEQ ID NO: 32355 - RNA, 22 nt, Artificial Sequence
  GATA2 Guide RNA
ccagccuggaguucggcuauuu

SEQ ID NO: 32356 - RNA, 22 nt, Artificial Sequence
  GATA2 Guide RNA
ccagcucacccucccugggccg

SEQ ID NO: 32357 - RNA, 22 nt, Artificial Sequence
  GATA2 Guide RNA
ccaggcugggcugagccaaagc

SEQ ID NO: 32358 - RNA, 22 nt, Artificial Sequence
  GATA2 Guide RNA
ccagggagggugagcuggugcc

SEQ ID NO: 32359 - RNA, 22 nt, Artificial Sequence
  GATA2 Guide RNA
ccagggcucugggggcagauuu

SEQ ID NO: 32360 - RNA, 22 nt, Artificial Sequence
  GATA2 Guide RNA
cccaaguccuccgguucuuccu

SEQ ID NO: 32361 - RNA, 22 nt, Artificial Sequence
  GATA2 Guide RNA
cccacaaaucugcccccagagc

SEQ ID NO: 32362 - RNA, 22 nt, Artificial Sequence
  GATA2 Guide RNA
cccagccuggaguucggcuauu

SEQ ID NO: 32363 - RNA, 22 nt, Artificial Sequence
  GATA2 Guide RNA
cccagggagggugagcuggugc

SEQ ID NO: 32364 - RNA, 22 nt, Artificial Sequence
  GATA2 Guide RNA
ccccacaaaucugcccccagag

SEQ ID NO: 32365 - RNA, 22 nt, Artificial Sequence
  GATA2 Guide RNA
cccccagagcccuggcaagugg

SEQ ID NO: 32366 - RNA, 22 nt, Artificial Sequence
  GATA2 Guide RNA
cccgaggaagaaccggaggacu

SEQ ID NO: 32367 - RNA, 22 nt, Artificial Sequence
  GATA2 Guide RNA
cccgccaaucccgaggaagaac

SEQ ID NO: 32368 - RNA, 22 nt, Artificial Sequence
  GATA2 Guide RNA
cccgucaaagcaggcaccagcu

SEQ ID NO: 32369 - RNA, 22 nt, Artificial Sequence
  GATA2 Guide RNA
cccuccagggccuggcccguca

SEQ ID NO: 32370 - RNA, 22 nt, Artificial Sequence
  GATA2 Guide RNA
cccucccugggccguggccacu

SEQ ID NO: 32371 - RNA, 22 nt, Artificial Sequence
  GATA2 Guide RNA
cccucucugaaauagccgaacu

SEQ ID NO: 32372 - RNA, 22 nt, Artificial Sequence
  GATA2 Guide RNA
cccucuucuccucuggcuuccc

SEQ ID NO: 32373 - RNA, 22 nt, Artificial Sequence
  GATA2 Guide RNA
cccuggcaaguggacccgccaa

SEQ ID NO: 32374 - RNA, 22 nt, Artificial Sequence
  GATA2 Guide RNA
cccugggccguggccacucugg

SEQ ID NO: 32375 - RNA, 22 nt, Artificial Sequence
  GATA2 Guide RNA
ccgaacuccaggcugggcugag

SEQ ID NO: 32376 - RNA, 22 nt, Artificial Sequence
  GATA2 Guide RNA
ccgaggaagaaccggaggacuu

SEQ ID NO: 32377 - RNA, 22 nt, Artificial Sequence
  GATA2 Guide RNA
ccgccaaucccgaggaagaacc

SEQ ID NO: 32378 - RNA, 22 nt, Artificial Sequence
  GATA2 Guide RNA
ccggaggacuugggacagcuca

SEQ ID NO: 32379 - RNA, 22 nt, Artificial Sequence
  GATA2 Guide RNA
ccgucaaagcaggcaccagcuc

SEQ ID NO: 32380 - RNA, 22 nt, Artificial Sequence
  GATA2 Guide RNA
ccguggccacucuggcuuuggc

SEQ ID NO: 32381 - RNA, 22 nt, Artificial Sequence
  GATA2 Guide RNA
ccucagccugcacccucuucuc

SEQ ID NO: 32382 - RNA, 22 nt, Artificial Sequence
  GATA2 Guide RNA
ccuccagggccuggcccgucaa

SEQ ID NO: 32383 - RNA, 22 nt, Artificial Sequence
  GATA2 Guide RNA
ccucccugggccguggccacuc

SEQ ID NO: 32384 - RNA, 22 nt, Artificial Sequence
  GATA2 Guide RNA
ccucgggauuggcggguccacu

SEQ ID NO: 32385 - RNA, 22 nt, Artificial Sequence
  GATA2 Guide RNA
ccucucugaaauagccgaacuc

SEQ ID NO: 32386 - RNA, 22 nt, Artificial Sequence
  GATA2 Guide RNA
ccucuggcuucccucucugaaa

SEQ ID NO: 32387 - RNA, 22 nt, Artificial Sequence
  GATA2 Guide RNA
ccucuucuccucuggcuucccu

SEQ ID NO: 32388 - RNA, 22 nt, Artificial Sequence
  GATA2 Guide RNA
ccugcacccucuucuccucugg

SEQ ID NO: 32389 - RNA, 22 nt, Artificial Sequence
  GATA2 Guide RNA
ccugcuuugacgggccaggccc

SEQ ID NO: 32390 - RNA, 22 nt, Artificial Sequence
  GATA2 Guide RNA
ccuggaguucggcuauuucaga

SEQ ID NO: 32391 - RNA, 22 nt, Artificial Sequence
  GATA2 Guide RNA
ccuggcaaguggacccgccaau

SEQ ID NO: 32392 - RNA, 22 nt, Artificial Sequence
  GATA2 Guide RNA
ccuggcccgucaaagcaggcac

SEQ ID NO: 32393 - RNA, 22 nt, Artificial Sequence
  GATA2 Guide RNA
ccugggccguggccacucuggc

SEQ ID NO: 32394 - RNA, 22 nt, Artificial Sequence
  GATA2 Guide RNA
ccuuguuagaaacaagagcaaa

SEQ ID NO: 32395 - RNA, 22 nt, Artificial Sequence
  GATA2 Guide RNA
cgaacuccaggcugggcugagc

SEQ ID NO: 32396 - RNA, 22 nt, Artificial Sequence
  GATA2 Guide RNA
cgaggaagaaccggaggacuug

SEQ ID NO: 32397 - RNA, 22 nt, Artificial Sequence
  GATA2 Guide RNA
cgccaaucccgaggaagaaccg

SEQ ID NO: 32398 - RNA, 22 nt, Artificial Sequence
  GATA2 Guide RNA
cggaggacuugggacagcucag

SEQ ID NO: 32399 - RNA, 22 nt, Artificial Sequence
  GATA2 Guide RNA
cggcuauuucagagagggaagc

SEQ ID NO: 32400 - RNA, 22 nt, Artificial Sequence
  GATA2 Guide RNA
cgggauuggcggguccacuugc

SEQ ID NO: 32401 - RNA, 22 nt, Artificial Sequence
  GATA2 Guide RNA
cggguccacuugccagggcucu

SEQ ID NO: 32402 - RNA, 22 nt, Artificial Sequence
  GATA2 Guide RNA
cgguucuuccucgggauuggcg

SEQ ID NO: 32403 - RNA, 22 nt, Artificial Sequence
  GATA2 Guide RNA
cgucaaagcaggcaccagcuca

SEQ ID NO: 32404 - RNA, 22 nt, Artificial Sequence
  GATA2 Guide RNA
cguggccacucuggcuuuggcu

SEQ ID NO: 32405 - RNA, 22 nt, Artificial Sequence
  GATA2 Guide RNA
cuaacaaggacuuggagacuug

SEQ ID NO: 32406 - RNA, 22 nt, Artificial Sequence
  GATA2 Guide RNA
cuauuucagagagggaagccag

SEQ ID NO: 32407 - RNA, 22 nt, Artificial Sequence
  GATA2 Guide RNA
cucacccucccugggccguggc

SEQ ID NO: 32408 - RNA, 22 nt, Artificial Sequence
  GATA2 Guide RNA
cucagaccaccaagucuccaag

SEQ ID NO: 32409 - RNA, 22 nt, Artificial Sequence
  GATA2 Guide RNA
cucagcccagccuggaguucgg

SEQ ID NO: 32410 - RNA, 22 nt, Artificial Sequence
  GATA2 Guide RNA
cucagccugcacccucuucucc

SEQ ID NO: 32411 - RNA, 22 nt, Artificial Sequence
  GATA2 Guide RNA
cuccaaguccuuguuagaaaca

SEQ ID NO: 32412 - RNA, 22 nt, Artificial Sequence
  GATA2 Guide RNA
cuccaggcugggcugagccaaa

SEQ ID NO: 32413 - RNA, 22 nt, Artificial Sequence
  GATA2 Guide RNA
cuccagggccuggcccgucaaa

SEQ ID NO: 32414 - RNA, 22 nt, Artificial Sequence
  GATA2 Guide RNA
cucccugggccguggccacucu

SEQ ID NO: 32415 - RNA, 22 nt, Artificial Sequence
  GATA2 Guide RNA
cuccucuggcuucccucucuga

SEQ ID NO: 32416 - RNA, 22 nt, Artificial Sequence
  GATA2 Guide RNA
cucgggauuggcggguccacuu

SEQ ID NO: 32417 - RNA, 22 nt, Artificial Sequence
  GATA2 Guide RNA
cucucugaaauagccgaacucc

SEQ ID NO: 32418 - RNA, 22 nt, Artificial Sequence
  GATA2 Guide RNA
cucugaaauagccgaacuccag

SEQ ID NO: 32419 - RNA, 22 nt, Artificial Sequence
  GATA2 Guide RNA
cucugcccuccagggccuggcc

SEQ ID NO: 32420 - RNA, 22 nt, Artificial Sequence
  GATA2 Guide RNA
cucuggcuucccucucugaaau

SEQ ID NO: 32421 - RNA, 22 nt, Artificial Sequence
  GATA2 Guide RNA
cucuggcuuuggcucagcccag

SEQ ID NO: 32422 - RNA, 22 nt, Artificial Sequence
  GATA2 Guide RNA
cucugggggcagauuugugggg

SEQ ID NO: 32423 - RNA, 22 nt, Artificial Sequence
  GATA2 Guide RNA
cucuucuccucuggcuucccuc

SEQ ID NO: 32424 - RNA, 22 nt, Artificial Sequence
  GATA2 Guide RNA
cucuuguuucuaacaaggacuu

SEQ ID NO: 32425 - RNA, 22 nt, Artificial Sequence
  GATA2 Guide RNA
cugaaauagccgaacuccaggc

SEQ ID NO: 32426 - RNA, 22 nt, Artificial Sequence
  GATA2 Guide RNA
cugagccaaagccagaguggcc

SEQ ID NO: 32427 - RNA, 22 nt, Artificial Sequence
  GATA2 Guide RNA
cugagcugucccaaguccuccg

SEQ ID NO: 32428 - RNA, 22 nt, Artificial Sequence
  GATA2 Guide RNA
cugagguccccacaaaucugcc

SEQ ID NO: 32429 - RNA, 22 nt, Artificial Sequence
  GATA2 Guide RNA
cugcacccucuucuccucuggc

SEQ ID NO: 32430 - RNA, 22 nt, Artificial Sequence
  GATA2 Guide RNA
cugcccccagagcccuggcaag

SEQ ID NO: 32431 - RNA, 22 nt, Artificial Sequence
  GATA2 Guide RNA
cugcuuugacgggccaggcccu

SEQ ID NO: 32432 - RNA, 22 nt, Artificial Sequence
  GATA2 Guide RNA
cuggaguucggcuauuucagag

SEQ ID NO: 32433 - RNA, 22 nt, Artificial Sequence
  GATA2 Guide RNA
cuggcaaguggacccgccaauc

SEQ ID NO: 32434 - RNA, 22 nt, Artificial Sequence
  GATA2 Guide RNA
cuggcccgucaaagcaggcacc

SEQ ID NO: 32435 - RNA, 22 nt, Artificial Sequence
  GATA2 Guide RNA
cuggcuucccucucugaaauag

SEQ ID NO: 32436 - RNA, 22 nt, Artificial Sequence
  GATA2 Guide RNA
cuggcuuuggcucagcccagcc

SEQ ID NO: 32437 - RNA, 22 nt, Artificial Sequence
  GATA2 Guide RNA
cugggccguggccacucuggcu

SEQ ID NO: 32438 - RNA, 22 nt, Artificial Sequence
  GATA2 Guide RNA
cugggcugagccaaagccagag

SEQ ID NO: 32439 - RNA, 22 nt, Artificial Sequence
  GATA2 Guide RNA
cugggggcagauuuguggggac

SEQ ID NO: 32440 - RNA, 22 nt, Artificial Sequence
  GATA2 Guide RNA
cuggugccugcuuugacgggcc

SEQ ID NO: 32441 - RNA, 22 nt, Artificial Sequence
  GATA2 Guide RNA
cugucccaaguccuccgguucu

SEQ ID NO: 32442 - RNA, 22 nt, Artificial Sequence
  GATA2 Guide RNA
cuucccucucugaaauagccga

SEQ ID NO: 32443 - RNA, 22 nt, Artificial Sequence
  GATA2 Guide RNA
cuuccucgggauuggcgggucc

SEQ ID NO: 32444 - RNA, 22 nt, Artificial Sequence
  GATA2 Guide RNA
cuucuccucuggcuucccucuc

SEQ ID NO: 32445 - RNA, 22 nt, Artificial Sequence
  GATA2 Guide RNA
cuugccagggcucugggggcag

SEQ ID NO: 32446 - RNA, 22 nt, Artificial Sequence
  GATA2 Guide RNA
cuuggagacuugguggucugag

SEQ ID NO: 32447 - RNA, 22 nt, Artificial Sequence
  GATA2 Guide RNA
cuugggacagcucagaccacca

SEQ ID NO: 32448 - RNA, 22 nt, Artificial Sequence
  GATA2 Guide RNA
cuugguggucugagcuguccca

SEQ ID NO: 32449 - RNA, 22 nt, Artificial Sequence
  GATA2 Guide RNA
cuuguuagaaacaagagcaaaa

SEQ ID NO: 32450 - RNA, 22 nt, Artificial Sequence
  GATA2 Guide RNA
cuuguuucuaacaaggacuugg

SEQ ID NO: 32451 - RNA, 22 nt, Artificial Sequence
  GATA2 Guide RNA
cuuugacgggccaggcccugga

SEQ ID NO: 32452 - RNA, 22 nt, Artificial Sequence
  GATA2 Guide RNA
cuuuggcucagcccagccugga

SEQ ID NO: 32453 - RNA, 22 nt, Artificial Sequence
  GATA2 Guide RNA
gaaauagccgaacuccaggcug

SEQ ID NO: 32454 - RNA, 22 nt, Artificial Sequence
  GATA2 Guide RNA
gaaccggaggacuugggacagc

SEQ ID NO: 32455 - RNA, 22 nt, Artificial Sequence
  GATA2 Guide RNA
gaacuccaggcugggcugagcc

SEQ ID NO: 32456 - RNA, 22 nt, Artificial Sequence
  GATA2 Guide RNA
gaagaaccggaggacuugggac

SEQ ID NO: 32457 - RNA, 22 nt, Artificial Sequence
  GATA2 Guide RNA
gaagagggugcaggcugagguc

SEQ ID NO: 32458 - RNA, 22 nt, Artificial Sequence
  GATA2 Guide RNA
gaagccagaggagaagagggug

SEQ ID NO: 32459 - RNA, 22 nt, Artificial Sequence
  GATA2 Guide RNA
gaaggaaaaaggauuaggcaaa

SEQ ID NO: 32460 - RNA, 22 nt, Artificial Sequence
  GATA2 Guide RNA
gacagcucagaccaccaagucu

SEQ ID NO: 32461 - RNA, 22 nt, Artificial Sequence
  GATA2 Guide RNA
gaccaccaagucuccaaguccu

SEQ ID NO: 32462 - RNA, 22 nt, Artificial Sequence
  GATA2 Guide RNA
gacccgccaaucccgaggaaga

SEQ ID NO: 32463 - RNA, 22 nt, Artificial Sequence
  GATA2 Guide RNA
gaccucagccugcacccucuuc

SEQ ID NO: 32464 - RNA, 22 nt, Artificial Sequence
  GATA2 Guide RNA
gacuuggagacuugguggucug

SEQ ID NO: 32465 - RNA, 22 nt, Artificial Sequence
  GATA2 Guide RNA
gacuugggacagcucagaccac

SEQ ID NO: 32466 - RNA, 22 nt, Artificial Sequence
  GATA2 Guide RNA
gacuugguggucugagcugucc

SEQ ID NO: 32467 - RNA, 22 nt, Artificial Sequence
  GATA2 Guide RNA
gagaagagggugcaggcugagg

SEQ ID NO: 32468 - RNA, 22 nt, Artificial Sequence
  GATA2 Guide RNA
gagacuugguggucugagcugu

SEQ ID NO: 32469 - RNA, 22 nt, Artificial Sequence
  GATA2 Guide RNA
gagagggaagccagaggagaag

SEQ ID NO: 32470 - RNA, 22 nt, Artificial Sequence
  GATA2 Guide RNA
gagccaaagccagaguggccac

SEQ ID NO: 32471 - RNA, 22 nt, Artificial Sequence
  GATA2 Guide RNA
gagcccuggcaaguggacccgc

SEQ ID NO: 32472 - RNA, 22 nt, Artificial Sequence
  GATA2 Guide RNA
gagcuggugccugcuuugacgg

SEQ ID NO: 32473 - RNA, 22 nt, Artificial Sequence
  GATA2 Guide RNA
gagcugucccaaguccuccggu

SEQ ID NO: 32474 - RNA, 22 nt, Artificial Sequence
  GATA2 Guide RNA
gaggaagaaccggaggacuugg

SEQ ID NO: 32475 - RNA, 22 nt, Artificial Sequence
  GATA2 Guide RNA
gaggacuugggacagcucagac

SEQ ID NO: 32476 - RNA, 22 nt, Artificial Sequence
  GATA2 Guide RNA
gaggagaagagggugcaggcug

SEQ ID NO: 32477 - RNA, 22 nt, Artificial Sequence
  GATA2 Guide RNA
gagggaagccagaggagaagag

SEQ ID NO: 32478 - RNA, 22 nt, Artificial Sequence
  GATA2 Guide RNA
gagggugagcuggugccugcuu

SEQ ID NO: 32479 - RNA, 22 nt, Artificial Sequence
  GATA2 Guide RNA
gagggugcaggcugaggucccc

SEQ ID NO: 32480 - RNA, 22 nt, Artificial Sequence
  GATA2 Guide RNA
gagguccccacaaaucugcccc

SEQ ID NO: 32481 - RNA, 22 nt, Artificial Sequence
  GATA2 Guide RNA
gaguggccacggcccagggagg

SEQ ID NO: 32482 - RNA, 22 nt, Artificial Sequence
  GATA2 Guide RNA
gaguucggcuauuucagagagg

SEQ ID NO: 32483 - RNA, 22 nt, Artificial Sequence
  GATA2 Guide RNA
gauuggcggguccacuugccag

SEQ ID NO: 32484 - RNA, 22 nt, Artificial Sequence
  GATA2 Guide RNA
gauuuguggggaccucagccug

SEQ ID NO: 32485 - RNA, 22 nt, Artificial Sequence
  GATA2 Guide RNA
gcaaguggacccgccaaucccg

SEQ ID NO: 32486 - RNA, 22 nt, Artificial Sequence
  GATA2 Guide RNA
gcaccagcucacccucccuggg

SEQ ID NO: 32487 - RNA, 22 nt, Artificial Sequence
  GATA2 Guide RNA
gcacccucuucuccucuggcuu

SEQ ID NO: 32488 - RNA, 22 nt, Artificial Sequence
  GATA2 Guide RNA
gcagauuuguggggaccucagc

SEQ ID NO: 32489 - RNA, 22 nt, Artificial Sequence
  GATA2 Guide RNA
gcaggcaccagcucacccuccc

SEQ ID NO: 32490 - RNA, 22 nt, Artificial Sequence
  GATA2 Guide RNA
gcaggcugagguccccacaaau

SEQ ID NO: 32491 - RNA, 22 nt, Artificial Sequence
  GATA2 Guide RNA
gccaaagccagaguggccacgg

SEQ ID NO: 32492 - RNA, 22 nt, Artificial Sequence
  GATA2 Guide RNA
gccaaucccgaggaagaaccgg

SEQ ID NO: 32493 - RNA, 22 nt, Artificial Sequence
  GATA2 Guide RNA
gccacggcccagggagggugag

SEQ ID NO: 32494 - RNA, 22 nt, Artificial Sequence
  GATA2 Guide RNA
gccacucuggcuuuggcucagc

SEQ ID NO: 32495 - RNA, 22 nt, Artificial Sequence
  GATA2 Guide RNA
gccagaggagaagagggugcag

SEQ ID NO: 32496 - RNA, 22 nt, Artificial Sequence
  GATA2 Guide RNA
gccagaguggccacggcccagg

SEQ ID NO: 32497 - RNA, 22 nt, Artificial Sequence
  GATA2 Guide RNA
gccagggcucugggggcagauu

SEQ ID NO: 32498 - RNA, 22 nt, Artificial Sequence
  GATA2 Guide RNA
gcccagccuggaguucggcuau

SEQ ID NO: 32499 - RNA, 22 nt, Artificial Sequence
  GATA2 Guide RNA
gcccccagagcccuggcaagug

SEQ ID NO: 32500 - RNA, 22 nt, Artificial Sequence
  GATA2 Guide RNA
gcccgucaaagcaggcaccagc

SEQ ID NO: 32501 - RNA, 22 nt, Artificial Sequence
  GATA2 Guide RNA
gcccuggcaaguggacccgcca

SEQ ID NO: 32502 - RNA, 22 nt, Artificial Sequence
  GATA2 Guide RNA
gccgaacuccaggcugggcuga

SEQ ID NO: 32503 - RNA, 22 nt, Artificial Sequence
  GATA2 Guide RNA
gccguggccacucuggcuuugg

SEQ ID NO: 32504 - RNA, 22 nt, Artificial Sequence
  GATA2 Guide RNA
gccugcacccucuucuccucug

SEQ ID NO: 32505 - RNA, 22 nt, Artificial Sequence
  GATA2 Guide RNA
gccugcuuugacgggccaggcc

SEQ ID NO: 32506 - RNA, 22 nt, Artificial Sequence
  GATA2 Guide RNA
gccuggaguucggcuauuucag

SEQ ID NO: 32507 - RNA, 22 nt, Artificial Sequence
  GATA2 Guide RNA
gccuggcccgucaaagcaggca

SEQ ID NO: 32508 - RNA, 22 nt, Artificial Sequence
  GATA2 Guide RNA
gcggguccacuugccagggcuc

SEQ ID NO: 32509 - RNA, 22 nt, Artificial Sequence
  GATA2 Guide RNA
gcuauuucagagagggaagcca

SEQ ID NO: 32510 - RNA, 22 nt, Artificial Sequence
  GATA2 Guide RNA
gcucacccucccugggccgugg

SEQ ID NO: 32511 - RNA, 22 nt, Artificial Sequence
  GATA2 Guide RNA
gcucagaccaccaagucuccaa

SEQ ID NO: 32512 - RNA, 22 nt, Artificial Sequence
  GATA2 Guide RNA
gcucagcccagccuggaguucg

SEQ ID NO: 32513 - RNA, 22 nt, Artificial Sequence
  GATA2 Guide RNA
gcucugggggcagauuuguggg

SEQ ID NO: 32514 - RNA, 22 nt, Artificial Sequence
  GATA2 Guide RNA
gcucuuguuucuaacaaggacu

SEQ ID NO: 32515 - RNA, 22 nt, Artificial Sequence
  GATA2 Guide RNA
gcugagccaaagccagaguggc

SEQ ID NO: 32516 - RNA, 22 nt, Artificial Sequence
  GATA2 Guide RNA
gcugagguccccacaaaucugc

SEQ ID NO: 32517 - RNA, 22 nt, Artificial Sequence
  GATA2 Guide RNA
gcugggcugagccaaagccaga

SEQ ID NO: 32518 - RNA, 22 nt, Artificial Sequence
  GATA2 Guide RNA
gcuggugccugcuuugacgggc

SEQ ID NO: 32519 - RNA, 22 nt, Artificial Sequence
  GATA2 Guide RNA
gcugucccaaguccuccgguuc

SEQ ID NO: 32520 - RNA, 22 nt, Artificial Sequence
  GATA2 Guide RNA
gcuucccucucugaaauagccg

SEQ ID NO: 32521 - RNA, 22 nt, Artificial Sequence
  GATA2 Guide RNA
gcuuugacgggccaggcccugg

SEQ ID NO: 32522 - RNA, 22 nt, Artificial Sequence
  GATA2 Guide RNA
gcuuuggcucagcccagccugg

SEQ ID NO: 32523 - RNA, 22 nt, Artificial Sequence
  GATA2 Guide RNA
ggaaaaaggauuaggcaaaaau

SEQ ID NO: 32524 - RNA, 22 nt, Artificial Sequence
  GATA2 Guide RNA
ggaagaaccggaggacuuggga

SEQ ID NO: 32525 - RNA, 22 nt, Artificial Sequence
  GATA2 Guide RNA
ggaagccagaggagaagagggu

SEQ ID NO: 32526 - RNA, 22 nt, Artificial Sequence
  GATA2 Guide RNA
ggacagcucagaccaccaaguc

SEQ ID NO: 32527 - RNA, 22 nt, Artificial Sequence
  GATA2 Guide RNA
ggacccgccaaucccgaggaag

SEQ ID NO: 32528 - RNA, 22 nt, Artificial Sequence
  GATA2 Guide RNA
ggaccucagccugcacccucuu

SEQ ID NO: 32529 - RNA, 22 nt, Artificial Sequence
  GATA2 Guide RNA
ggacuuggagacuugguggucu

SEQ ID NO: 32530 - RNA, 22 nt, Artificial Sequence
  GATA2 Guide RNA
ggacuugggacagcucagacca

SEQ ID NO: 32531 - RNA, 22 nt, Artificial Sequence
  GATA2 Guide RNA
ggagaagagggugcaggcugag

SEQ ID NO: 32532 - RNA, 22 nt, Artificial Sequence
  GATA2 Guide RNA
ggagacuugguggucugagcug

SEQ ID NO: 32533 - RNA, 22 nt, Artificial Sequence
  GATA2 Guide RNA
ggaggacuugggacagcucaga

SEQ ID NO: 32534 - RNA, 22 nt, Artificial Sequence
  GATA2 Guide RNA
ggagggugagcuggugccugcu

SEQ ID NO: 32535 - RNA, 22 nt, Artificial Sequence
  GATA2 Guide RNA
ggaguucggcuauuucagagag

SEQ ID NO: 32536 - RNA, 22 nt, Artificial Sequence
  GATA2 Guide RNA
ggauuggcggguccacuugcca

SEQ ID NO: 32537 - RNA, 22 nt, Artificial Sequence
  GATA2 Guide RNA
ggcaaguggacccgccaauccc

SEQ ID NO: 32538 - RNA, 22 nt, Artificial Sequence
  GATA2 Guide RNA
ggcaccagcucacccucccugg

SEQ ID NO: 32539 - RNA, 22 nt, Artificial Sequence
  GATA2 Guide RNA
ggcagauuuguggggaccucag

SEQ ID NO: 32540 - RNA, 22 nt, Artificial Sequence
  GATA2 Guide RNA
ggccacggcccagggaggguga

SEQ ID NO: 32541 - RNA, 22 nt, Artificial Sequence
  GATA2 Guide RNA
ggccacucuggcuuuggcucag

SEQ ID NO: 32542 - RNA, 22 nt, Artificial Sequence
  GATA2 Guide RNA
ggcccgucaaagcaggcaccag

SEQ ID NO: 32543 - RNA, 22 nt, Artificial Sequence
  GATA2 Guide RNA
ggccguggccacucuggcuuug

SEQ ID NO: 32544 - RNA, 22 nt, Artificial Sequence
  GATA2 Guide RNA
ggccuggcccgucaaagcaggc

SEQ ID NO: 32545 - RNA, 22 nt, Artificial Sequence
  GATA2 Guide RNA
ggcggguccacuugccagggcu

SEQ ID NO: 32546 - RNA, 22 nt, Artificial Sequence
  GATA2 Guide RNA
ggcuauuucagagagggaagcc

SEQ ID NO: 32547 - RNA, 22 nt, Artificial Sequence
  GATA2 Guide RNA
ggcucagcccagccuggaguuc

SEQ ID NO: 32548 - RNA, 22 nt, Artificial Sequence
  GATA2 Guide RNA
ggcucugggggcagauuugugg

SEQ ID NO: 32549 - RNA, 22 nt, Artificial Sequence
  GATA2 Guide RNA
ggcugagccaaagccagagugg

SEQ ID NO: 32550 - RNA, 22 nt, Artificial Sequence
  GATA2 Guide RNA
ggcugagguccccacaaaucug

SEQ ID NO: 32551 - RNA, 22 nt, Artificial Sequence
  GATA2 Guide RNA
ggcugggcugagccaaagccag

SEQ ID NO: 32552 - RNA, 22 nt, Artificial Sequence
  GATA2 Guide RNA
ggcuucccucucugaaauagcc

SEQ ID NO: 32553 - RNA, 22 nt, Artificial Sequence
  GATA2 Guide RNA
ggcuuuggcucagcccagccug

SEQ ID NO: 32554 - RNA, 22 nt, Artificial Sequence
  GATA2 Guide RNA
gggaagccagaggagaagaggg

SEQ ID NO: 32555 - RNA, 22 nt, Artificial Sequence
  GATA2 Guide RNA
gggacagcucagaccaccaagu

SEQ ID NO: 32556 - RNA, 22 nt, Artificial Sequence
  GATA2 Guide RNA
gggaccucagccugcacccucu

SEQ ID NO: 32557 - RNA, 22 nt, Artificial Sequence
  GATA2 Guide RNA
gggagggugagcuggugccugc

SEQ ID NO: 32558 - RNA, 22 nt, Artificial Sequence
  GATA2 Guide RNA
gggauuggcggguccacuugcc

SEQ ID NO: 32559 - RNA, 22 nt, Artificial Sequence
  GATA2 Guide RNA
gggcagauuuguggggaccuca

SEQ ID NO: 32560 - RNA, 22 nt, Artificial Sequence
  GATA2 Guide RNA
gggccaggcccuggagggcaga

SEQ ID NO: 32561 - RNA, 22 nt, Artificial Sequence
  GATA2 Guide RNA
gggccguggccacucuggcuuu

SEQ ID NO: 32562 - RNA, 22 nt, Artificial Sequence
  GATA2 Guide RNA
gggccuggcccgucaaagcagg

SEQ ID NO: 32563 - RNA, 22 nt, Artificial Sequence
  GATA2 Guide RNA
gggcucugggggcagauuugug

SEQ ID NO: 32564 - RNA, 22 nt, Artificial Sequence
  GATA2 Guide RNA
gggcugagccaaagccagagug

SEQ ID NO: 32565 - RNA, 22 nt, Artificial Sequence
  GATA2 Guide RNA
ggggaccucagccugcacccuc

SEQ ID NO: 32566 - RNA, 22 nt, Artificial Sequence
  GATA2 Guide RNA
ggggcagauuuguggggaccuc

SEQ ID NO: 32567 - RNA, 22 nt, Artificial Sequence
  GATA2 Guide RNA
gggggcagauuuguggggaccu

SEQ ID NO: 32568 - RNA, 22 nt, Artificial Sequence
  GATA2 Guide RNA
ggguccacuugccagggcucug

SEQ ID NO: 32569 - RNA, 22 nt, Artificial Sequence
  GATA2 Guide RNA
gggugagcuggugccugcuuug

SEQ ID NO: 32570 - RNA, 22 nt, Artificial Sequence
  GATA2 Guide RNA
gggugcaggcugagguccccac

SEQ ID NO: 32571 - RNA, 22 nt, Artificial Sequence
  GATA2 Guide RNA
gguccacuugccagggcucugg

SEQ ID NO: 32572 - RNA, 22 nt, Artificial Sequence
  GATA2 Guide RNA
gguccccacaaaucugccccca

SEQ ID NO: 32573 - RNA, 22 nt, Artificial Sequence
  GATA2 Guide RNA
ggucugagcugucccaaguccu

SEQ ID NO: 32574 - RNA, 22 nt, Artificial Sequence
  GATA2 Guide RNA
ggugagcuggugccugcuuuga

SEQ ID NO: 32575 - RNA, 22 nt, Artificial Sequence
  GATA2 Guide RNA
ggugcaggcugagguccccaca

SEQ ID NO: 32576 - RNA, 22 nt, Artificial Sequence
  GATA2 Guide RNA
ggugccugcuuugacgggccag

SEQ ID NO: 32577 - RNA, 22 nt, Artificial Sequence
  GATA2 Guide RNA
gguggucugagcugucccaagu

SEQ ID NO: 32578 - RNA, 22 nt, Artificial Sequence
  GATA2 Guide RNA
gguucuuccucgggauuggcgg

SEQ ID NO: 32579 - RNA, 22 nt, Artificial Sequence
  GATA2 Guide RNA
gucaaagcaggcaccagcucac

SEQ ID NO: 32580 - RNA, 22 nt, Artificial Sequence
  GATA2 Guide RNA
guccacuugccagggcucuggg

SEQ ID NO: 32581 - RNA, 22 nt, Artificial Sequence
  GATA2 Guide RNA
gucccaaguccuccgguucuuc

SEQ ID NO: 32582 - RNA, 22 nt, Artificial Sequence
  GATA2 Guide RNA
guccccacaaaucugcccccag

SEQ ID NO: 32583 - RNA, 22 nt, Artificial Sequence
  GATA2 Guide RNA
guccuccgguucuuccucggga

SEQ ID NO: 32584 - RNA, 22 nt, Artificial Sequence
  GATA2 Guide RNA
guccuuguuagaaacaagagca

SEQ ID NO: 32585 - RNA, 22 nt, Artificial Sequence
  GATA2 Guide RNA
gucuccaaguccuuguuagaaa

SEQ ID NO: 32586 - RNA, 22 nt, Artificial Sequence
  GATA2 Guide RNA
gucucugcccuccagggccugg

SEQ ID NO: 32587 - RNA, 22 nt, Artificial Sequence
  GATA2 Guide RNA
gucugagcugucccaaguccuc

SEQ ID NO: 32588 - RNA, 22 nt, Artificial Sequence
  GATA2 Guide RNA
gugagcuggugccugcuuugac

SEQ ID NO: 32589 - RNA, 22 nt, Artificial Sequence
  GATA2 Guide RNA
gugcaggcugagguccccacaa

SEQ ID NO: 32590 - RNA, 22 nt, Artificial Sequence
  GATA2 Guide RNA
gugccugcuuugacgggccagg

SEQ ID NO: 32591 - RNA, 22 nt, Artificial Sequence
  GATA2 Guide RNA
guggacccgccaaucccgagga

SEQ ID NO: 32592 - RNA, 22 nt, Artificial Sequence
  GATA2 Guide RNA
guggccacggcccagggagggu

SEQ ID NO: 32593 - RNA, 22 nt, Artificial Sequence
  GATA2 Guide RNA
guggccacucuggcuuuggcuc

SEQ ID NO: 32594 - RNA, 22 nt, Artificial Sequence
  GATA2 Guide RNA
guggggaccucagccugcaccc

SEQ ID NO: 32595 - RNA, 22 nt, Artificial Sequence
  GATA2 Guide RNA
guggucugagcugucccaaguc

SEQ ID NO: 32596 - RNA, 22 nt, Artificial Sequence
  GATA2 Guide RNA
guucggcuauuucagagaggga

SEQ ID NO: 32597 - RNA, 22 nt, Artificial Sequence
  GATA2 Guide RNA
guucuuccucgggauuggcggg

SEQ ID NO: 32598 - RNA, 22 nt, Artificial Sequence
  GATA2 Guide RNA
guuucuaacaaggacuuggaga

SEQ ID NO: 32599 - RNA, 22 nt, Artificial Sequence
  GATA2 Guide RNA
uaacaaggacuuggagacuugg

SEQ ID NO: 32600 - RNA, 22 nt, Artificial Sequence
  GATA2 Guide RNA
uagaaggaaaaaggauuaggca

SEQ ID NO: 32601 - RNA, 22 nt, Artificial Sequence
  GATA2 Guide RNA
uagccgaacuccaggcugggcu

SEQ ID NO: 32602 - RNA, 22 nt, Artificial Sequence
  GATA2 Guide RNA
uauuucagagagggaagccaga

SEQ ID NO: 32603 - RNA, 22 nt, Artificial Sequence
  GATA2 Guide RNA
ucaaagcaggcaccagcucacc

SEQ ID NO: 32604 - RNA, 22 nt, Artificial Sequence
  GATA2 Guide RNA
ucacccucccugggccguggcc

SEQ ID NO: 32605 - RNA, 22 nt, Artificial Sequence
  GATA2 Guide RNA
ucagaccaccaagucuccaagu

SEQ ID NO: 32606 - RNA, 22 nt, Artificial Sequence
  GATA2 Guide RNA
ucagagagggaagccagaggag

SEQ ID NO: 32607 - RNA, 22 nt, Artificial Sequence
  GATA2 Guide RNA
ucagcccagccuggaguucggc

SEQ ID NO: 32608 - RNA, 22 nt, Artificial Sequence
  GATA2 Guide RNA
ucagccugcacccucuucuccu

SEQ ID NO: 32609 - RNA, 22 nt, Artificial Sequence
  GATA2 Guide RNA
uccaaguccuuguuagaaacaa

SEQ ID NO: 32610 - RNA, 22 nt, Artificial Sequence
  GATA2 Guide RNA
uccacuugccagggcucugggg

SEQ ID NO: 32611 - RNA, 22 nt, Artificial Sequence
  GATA2 Guide RNA
uccaggcugggcugagccaaag

SEQ ID NO: 32612 - RNA, 22 nt, Artificial Sequence
  GATA2 Guide RNA
uccagggccuggcccgucaaag

SEQ ID NO: 32613 - RNA, 22 nt, Artificial Sequence
  GATA2 Guide RNA
ucccaaguccuccgguucuucc

SEQ ID NO: 32614 - RNA, 22 nt, Artificial Sequence
  GATA2 Guide RNA
uccccacaaaucugcccccaga

SEQ ID NO: 32615 - RNA, 22 nt, Artificial Sequence
  GATA2 Guide RNA
ucccgaggaagaaccggaggac

SEQ ID NO: 32616 - RNA, 22 nt, Artificial Sequence
  GATA2 Guide RNA
ucccucucugaaauagccgaac

SEQ ID NO: 32617 - RNA, 22 nt, Artificial Sequence
  GATA2 Guide RNA
ucccugggccguggccacucug

SEQ ID NO: 32618 - RNA, 22 nt, Artificial Sequence
  GATA2 Guide RNA
uccuccgguucuuccucgggau

SEQ ID NO: 32619 - RNA, 22 nt, Artificial Sequence
  GATA2 Guide RNA
uccucgggauuggcggguccac

SEQ ID NO: 32620 - RNA, 22 nt, Artificial Sequence
  GATA2 Guide RNA
uccucuggcuucccucucugaa

SEQ ID NO: 32621 - RNA, 22 nt, Artificial Sequence
  GATA2 Guide RNA
uccuuguuagaaacaagagcaa

SEQ ID NO: 32622 - RNA, 22 nt, Artificial Sequence
  GATA2 Guide RNA
ucggcuauuucagagagggaag

SEQ ID NO: 32623 - RNA, 22 nt, Artificial Sequence
  GATA2 Guide RNA
ucgggauuggcggguccacuug

SEQ ID NO: 32624 - RNA, 22 nt, Artificial Sequence
  GATA2 Guide RNA
ucuaacaaggacuuggagacuu

SEQ ID NO: 32625 - RNA, 22 nt, Artificial Sequence
  GATA2 Guide RNA
ucuccaaguccuuguuagaaac

SEQ ID NO: 32626 - RNA, 22 nt, Artificial Sequence
  GATA2 Guide RNA
ucuccucuggcuucccucucug

SEQ ID NO: 32627 - RNA, 22 nt, Artificial Sequence
  GATA2 Guide RNA
ucucugaaauagccgaacucca

SEQ ID NO: 32628 - RNA, 22 nt, Artificial Sequence
  GATA2 Guide RNA
ucucugcccuccagggccuggc

SEQ ID NO: 32629 - RNA, 22 nt, Artificial Sequence
  GATA2 Guide RNA
ucugaaauagccgaacuccagg

SEQ ID NO: 32630 - RNA, 22 nt, Artificial Sequence
  GATA2 Guide RNA
ucugagcugucccaaguccucc

SEQ ID NO: 32631 - RNA, 22 nt, Artificial Sequence
  GATA2 Guide RNA
ucugcccccagagcccuggcaa

SEQ ID NO: 32632 - RNA, 22 nt, Artificial Sequence
  GATA2 Guide RNA
ucugcccuccagggccuggccc

SEQ ID NO: 32633 - RNA, 22 nt, Artificial Sequence
  GATA2 Guide RNA
ucuggcuucccucucugaaaua

SEQ ID NO: 32634 - RNA, 22 nt, Artificial Sequence
  GATA2 Guide RNA
ucuggcuuuggcucagcccagc

SEQ ID NO: 32635 - RNA, 22 nt, Artificial Sequence
  GATA2 Guide RNA
ucugggggcagauuugugggga

SEQ ID NO: 32636 - RNA, 22 nt, Artificial Sequence
  GATA2 Guide RNA
ucuuccucgggauuggcggguc

SEQ ID NO: 32637 - RNA, 22 nt, Artificial Sequence
  GATA2 Guide RNA
ucuucuccucuggcuucccucu

SEQ ID NO: 32638 - RNA, 22 nt, Artificial Sequence
  GATA2 Guide RNA
ucuuguuucuaacaaggacuug

SEQ ID NO: 32639 - RNA, 22 nt, Artificial Sequence
  GATA2 Guide RNA
ugaaauagccgaacuccaggcu

SEQ ID NO: 32640 - RNA, 22 nt, Artificial Sequence
  GATA2 Guide RNA
ugacgggccaggcccuggaggg

SEQ ID NO: 32641 - RNA, 22 nt, Artificial Sequence
  GATA2 Guide RNA
ugagccaaagccagaguggcca

SEQ ID NO: 32642 - RNA, 22 nt, Artificial Sequence
  GATA2 Guide RNA
ugagcuggugccugcuuugacg

SEQ ID NO: 32643 - RNA, 22 nt, Artificial Sequence
  GATA2 Guide RNA
ugagcugucccaaguccuccgg

SEQ ID NO: 32644 - RNA, 22 nt, Artificial Sequence
  GATA2 Guide RNA
ugagguccccacaaaucugccc

SEQ ID NO: 32645 - RNA, 22 nt, Artificial Sequence
  GATA2 Guide RNA
ugcacccucuucuccucuggcu

SEQ ID NO: 32646 - RNA, 22 nt, Artificial Sequence
  GATA2 Guide RNA
ugcaggcugagguccccacaaa

SEQ ID NO: 32647 - RNA, 22 nt, Artificial Sequence
  GATA2 Guide RNA
ugccagggcucugggggcagau

SEQ ID NO: 32648 - RNA, 22 nt, Artificial Sequence
  GATA2 Guide RNA
ugcccccagagcccuggcaagu

SEQ ID NO: 32649 - RNA, 22 nt, Artificial Sequence
  GATA2 Guide RNA
ugcccuccagggccuggcccgu

SEQ ID NO: 32650 - RNA, 22 nt, Artificial Sequence
  GATA2 Guide RNA
ugccugcuuugacgggccaggc

SEQ ID NO: 32651 - RNA, 22 nt, Artificial Sequence
  GATA2 Guide RNA
ugcucuuguuucuaacaaggac

SEQ ID NO: 32652 - RNA, 22 nt, Artificial Sequence
  GATA2 Guide RNA
ugcuuugacgggccaggcccug

SEQ ID NO: 32653 - RNA, 22 nt, Artificial Sequence
  GATA2 Guide RNA
uggacccgccaaucccgaggaa

SEQ ID NO: 32654 - RNA, 22 nt, Artificial Sequence
  GATA2 Guide RNA
uggagacuugguggucugagcu

SEQ ID NO: 32655 - RNA, 22 nt, Artificial Sequence
  GATA2 Guide RNA
uggaguucggcuauuucagaga

SEQ ID NO: 32656 - RNA, 22 nt, Artificial Sequence
  GATA2 Guide RNA
uggcaaguggacccgccaaucc

SEQ ID NO: 32657 - RNA, 22 nt, Artificial Sequence
  GATA2 Guide RNA
uggccacggcccagggagggug

SEQ ID NO: 32658 - RNA, 22 nt, Artificial Sequence
  GATA2 Guide RNA
uggccacucuggcuuuggcuca

SEQ ID NO: 32659 - RNA, 22 nt, Artificial Sequence
  GATA2 Guide RNA
uggcccgucaaagcaggcacca

SEQ ID NO: 32660 - RNA, 22 nt, Artificial Sequence
  GATA2 Guide RNA
uggcggguccacuugccagggc

SEQ ID NO: 32661 - RNA, 22 nt, Artificial Sequence
  GATA2 Guide RNA
uggcucagcccagccuggaguu

SEQ ID NO: 32662 - RNA, 22 nt, Artificial Sequence
  GATA2 Guide RNA
uggcuucccucucugaaauagc

SEQ ID NO: 32663 - RNA, 22 nt, Artificial Sequence
  GATA2 Guide RNA
uggcuuuggcucagcccagccu

SEQ ID NO: 32664 - RNA, 22 nt, Artificial Sequence
  GATA2 Guide RNA
ugggacagcucagaccaccaag

SEQ ID NO: 32665 - RNA, 22 nt, Artificial Sequence
  GATA2 Guide RNA
ugggccguggccacucuggcuu

SEQ ID NO: 32666 - RNA, 22 nt, Artificial Sequence
  GATA2 Guide RNA
ugggcugagccaaagccagagu

SEQ ID NO: 32667 - RNA, 22 nt, Artificial Sequence
  GATA2 Guide RNA
uggggaccucagccugcacccu

SEQ ID NO: 32668 - RNA, 22 nt, Artificial Sequence
  GATA2 Guide RNA
ugggggcagauuuguggggacc

SEQ ID NO: 32669 - RNA, 22 nt, Artificial Sequence
  GATA2 Guide RNA
uggucugagcugucccaagucc

SEQ ID NO: 32670 - RNA, 22 nt, Artificial Sequence
  GATA2 Guide RNA
uggugccugcuuugacgggcca

SEQ ID NO: 32671 - RNA, 22 nt, Artificial Sequence
  GATA2 Guide RNA
ugguggucugagcugucccaag

SEQ ID NO: 32672 - RNA, 22 nt, Artificial Sequence
  GATA2 Guide RNA
ugucccaaguccuccgguucuu

SEQ ID NO: 32673 - RNA, 22 nt, Artificial Sequence
  GATA2 Guide RNA
ugucucugcccuccagggccug

SEQ ID NO: 32674 - RNA, 22 nt, Artificial Sequence
  GATA2 Guide RNA
uguggggaccucagccugcacc

SEQ ID NO: 32675 - RNA, 22 nt, Artificial Sequence
  GATA2 Guide RNA
uguuucuaacaaggacuuggag

SEQ ID NO: 32676 - RNA, 22 nt, Artificial Sequence
  GATA2 Guide RNA
uuagaaggaaaaaggauuaggc

SEQ ID NO: 32677 - RNA, 22 nt, Artificial Sequence
  GATA2 Guide RNA
uucagagagggaagccagagga

SEQ ID NO: 32678 - RNA, 22 nt, Artificial Sequence
  GATA2 Guide RNA
uucccucucugaaauagccgaa

SEQ ID NO: 32679 - RNA, 22 nt, Artificial Sequence
  GATA2 Guide RNA
uuccucgggauuggcgggucca

SEQ ID NO: 32680 - RNA, 22 nt, Artificial Sequence
  GATA2 Guide RNA
uucggcuauuucagagagggaa

SEQ ID NO: 32681 - RNA, 22 nt, Artificial Sequence
  GATA2 Guide RNA
uucuaacaaggacuuggagacu

SEQ ID NO: 32682 - RNA, 22 nt, Artificial Sequence
  GATA2 Guide RNA
uucuccucuggcuucccucucu

SEQ ID NO: 32683 - RNA, 22 nt, Artificial Sequence
  GATA2 Guide RNA
uucuuccucgggauuggcgggu

SEQ ID NO: 32684 - RNA, 22 nt, Artificial Sequence
  GATA2 Guide RNA
uugacgggccaggcccuggagg

SEQ ID NO: 32685 - RNA, 22 nt, Artificial Sequence
  GATA2 Guide RNA
uugccagggcucugggggcaga

SEQ ID NO: 32686 - RNA, 22 nt, Artificial Sequence
  GATA2 Guide RNA
uugccuaauccuuuuuccuucu

SEQ ID NO: 32687 - RNA, 22 nt, Artificial Sequence
  GATA2 Guide RNA
uugcucuuguuucuaacaagga

SEQ ID NO: 32688 - RNA, 22 nt, Artificial Sequence
  GATA2 Guide RNA
uuggagacuugguggucugagc

SEQ ID NO: 32689 - RNA, 22 nt, Artificial Sequence
  GATA2 Guide RNA
uuggcggguccacuugccaggg

SEQ ID NO: 32690 - RNA, 22 nt, Artificial Sequence
  GATA2 Guide RNA
uuggcucagcccagccuggagu

SEQ ID NO: 32691 - RNA, 22 nt, Artificial Sequence
  GATA2 Guide RNA
uugggacagcucagaccaccaa

SEQ ID NO: 32692 - RNA, 22 nt, Artificial Sequence
  GATA2 Guide RNA
uugguggucugagcugucccaa

SEQ ID NO: 32693 - RNA, 22 nt, Artificial Sequence
  GATA2 Guide RNA
uuguggggaccucagccugcac

SEQ ID NO: 32694 - RNA, 22 nt, Artificial Sequence
  GATA2 Guide RNA
uuguuucuaacaaggacuugga

SEQ ID NO: 32695 - RNA, 22 nt, Artificial Sequence
  GATA2 Guide RNA
uuuagaaggaaaaaggauuagg

SEQ ID NO: 32696 - RNA, 22 nt, Artificial Sequence
  GATA2 Guide RNA
uuucagagagggaagccagagg

SEQ ID NO: 32697 - RNA, 22 nt, Artificial Sequence
  GATA2 Guide RNA
uuucuaacaaggacuuggagac

SEQ ID NO: 32698 - RNA, 22 nt, Artificial Sequence
  GATA2 Guide RNA
uuugacgggccaggcccuggag

SEQ ID NO: 32699 - RNA, 22 nt, Artificial Sequence
  GATA2 Guide RNA
uuugccuaauccuuuuuccuuc

SEQ ID NO: 32700 - RNA, 22 nt, Artificial Sequence
  GATA2 Guide RNA
uuugcucuuguuucuaacaagg

SEQ ID NO: 32701 - RNA, 22 nt, Artificial Sequence
  GATA2 Guide RNA
uuuggcucagcccagccuggag

SEQ ID NO: 32702 - RNA, 22 nt, Artificial Sequence
  GATA2 Guide RNA
uuuguggggaccucagccugca

SEQ ID NO: 32703 - RNA, 22 nt, Artificial Sequence
  GATA2 Guide RNA
uuuugccuaauccuuuuuccuu

SEQ ID NO: 32704 - RNA, 22 nt, Artificial Sequence
  GATA2 Guide RNA
uuuugcucuuguuucuaacaag

SEQ ID NO: 32705 - RNA, 22 nt, Artificial Sequence
  GATA2 Guide RNA
uuuuugccuaauccuuuuuccu

SEQ ID NO: 32706 - RNA, 20 nt, Artificial Sequence
  GATA2 Guide RNA
aaaacgaaaggaaggcgggg

SEQ ID NO: 32707 - RNA, 20 nt, Artificial Sequence
  GATA2 Guide RNA
aaacgaaaggaaggcggggg

SEQ ID NO: 32708 - RNA, 20 nt, Artificial Sequence
  GATA2 Guide RNA
aaagagcaccagucccgggu

SEQ ID NO: 32709 - RNA, 20 nt, Artificial Sequence
  GATA2 Guide RNA
aaagcccaaggcucaaaacg

SEQ ID NO: 32710 - RNA, 20 nt, Artificial Sequence
  GATA2 Guide RNA
aaaggaaggcgggggagggg

SEQ ID NO: 32711 - RNA, 20 nt, Artificial Sequence
  GATA2 Guide RNA
aaagucccaccacgaggugu

SEQ ID NO: 32712 - RNA, 20 nt, Artificial Sequence
  GATA2 Guide RNA
aacccccucccccgccuucc

SEQ ID NO: 32713 - RNA, 20 nt, Artificial Sequence
  GATA2 Guide RNA
aacgaaaggaaggcggggga

SEQ ID NO: 32714 - RNA, 20 nt, Artificial Sequence
  GATA2 Guide RNA
aacggcccugcgcgaggaag

SEQ ID NO: 32715 - RNA, 20 nt, Artificial Sequence
  GATA2 Guide RNA
aagagcaccagucccgggug

SEQ ID NO: 32716 - RNA, 20 nt, Artificial Sequence
  GATA2 Guide RNA
aagcccaaggcucaaaacga

SEQ ID NO: 32717 - RNA, 20 nt, Artificial Sequence
  GATA2 Guide RNA
aaggaaggcgggggaggggg

SEQ ID NO: 32718 - RNA, 20 nt, Artificial Sequence
  GATA2 Guide RNA
aaggcgggggaggggguuca

SEQ ID NO: 32719 - RNA, 20 nt, Artificial Sequence
  GATA2 Guide RNA
aaggcucaaaacgaaaggaa

SEQ ID NO: 32720 - RNA, 20 nt, Artificial Sequence
  GATA2 Guide RNA
aagggggagugaggcgugcc

SEQ ID NO: 32721 - RNA, 20 nt, Artificial Sequence
  GATA2 Guide RNA
aagucccaccacgagguguc

SEQ ID NO: 32722 - RNA, 20 nt, Artificial Sequence
  GATA2 Guide RNA
acaccccccaaagucccacc

SEQ ID NO: 32723 - RNA, 20 nt, Artificial Sequence
  GATA2 Guide RNA
acaccucguggugggacuuu

SEQ ID NO: 32724 - RNA, 20 nt, Artificial Sequence
  GATA2 Guide RNA
acacucacguggugacccgc

SEQ ID NO: 32725 - RNA, 20 nt, Artificial Sequence
  GATA2 Guide RNA
accacgaggugucccgcacg

SEQ ID NO: 32726 - RNA, 20 nt, Artificial Sequence
  GATA2 Guide RNA
accacgugagugugcguggc

SEQ ID NO: 32727 - RNA, 20 nt, Artificial Sequence
  GATA2 Guide RNA
accagucccgggugggagga

SEQ ID NO: 32728 - RNA, 20 nt, Artificial Sequence
  GATA2 Guide RNA
acccagacccugagccgccg

SEQ ID NO: 32729 - RNA, 20 nt, Artificial Sequence
  GATA2 Guide RNA
accccccaaagucccaccac

SEQ ID NO: 32730 - RNA, 20 nt, Artificial Sequence
  GATA2 Guide RNA
acccccucccccgccuuccu

SEQ ID NO: 32731 - RNA, 20 nt, Artificial Sequence
  GATA2 Guide RNA
acccgcggcuccagaaucac

SEQ ID NO: 32732 - RNA, 20 nt, Artificial Sequence
  GATA2 Guide RNA
acccgggacuggugcucuuu

SEQ ID NO: 32733 - RNA, 20 nt, Artificial Sequence
  GATA2 Guide RNA
accuccauggccggcggcgg

SEQ ID NO: 32734 - RNA, 20 nt, Artificial Sequence
  GATA2 Guide RNA
accucguggugggacuuugg

SEQ ID NO: 32735 - RNA, 20 nt, Artificial Sequence
  GATA2 Guide RNA
acgaaaggaaggcgggggag

SEQ ID NO: 32736 - RNA, 20 nt, Artificial Sequence
  GATA2 Guide RNA
acgaggugucccgcacgcca

SEQ ID NO: 32737 - RNA, 20 nt, Artificial Sequence
  GATA2 Guide RNA
acgcacacucacguggugac

SEQ ID NO: 32738 - RNA, 20 nt, Artificial Sequence
  GATA2 Guide RNA
acgccacggagccccagccc

SEQ ID NO: 32739 - RNA, 20 nt, Artificial Sequence
  GATA2 Guide RNA
acgccucacucccccuuccu

SEQ ID NO: 32740 - RNA, 20 nt, Artificial Sequence
  GATA2 Guide RNA
acggagccccagcccagauc

SEQ ID NO: 32741 - RNA, 20 nt, Artificial Sequence
  GATA2 Guide RNA
acggcaacggcccugcgcga

SEQ ID NO: 32742 - RNA, 20 nt, Artificial Sequence
  GATA2 Guide RNA
acggcccugcgcgaggaagg

SEQ ID NO: 32743 - RNA, 20 nt, Artificial Sequence
  GATA2 Guide RNA
acgugagugugcguggcuga

SEQ ID NO: 32744 - RNA, 20 nt, Artificial Sequence
  GATA2 Guide RNA
acguggugacccgcggcucc

SEQ ID NO: 32745 - RNA, 20 nt, Artificial Sequence
  GATA2 Guide RNA
acucacguggugacccgcgg

SEQ ID NO: 32746 - RNA, 20 nt, Artificial Sequence
  GATA2 Guide RNA
acuggugcucuuucucgccg

SEQ ID NO: 32747 - RNA, 20 nt, Artificial Sequence
  GATA2 Guide RNA
acuuuggggggugucaggcg

SEQ ID NO: 32748 - RNA, 20 nt, Artificial Sequence
  GATA2 Guide RNA
agaaagagcaccagucccgg

SEQ ID NO: 32749 - RNA, 20 nt, Artificial Sequence
  GATA2 Guide RNA
agacggcaacggcccugcgc

SEQ ID NO: 32750 - RNA, 20 nt, Artificial Sequence
  GATA2 Guide RNA
agagcaccagucccgggugg

SEQ ID NO: 32751 - RNA, 20 nt, Artificial Sequence
  GATA2 Guide RNA
agauccggcgagaaagagca

SEQ ID NO: 32752 - RNA, 20 nt, Artificial Sequence
  GATA2 Guide RNA
agcaccagucccggguggga

SEQ ID NO: 32753 - RNA, 20 nt, Artificial Sequence
  GATA2 Guide RNA
agccacgcacacucacgugg

SEQ ID NO: 32754 - RNA, 20 nt, Artificial Sequence
  GATA2 Guide RNA
agcccaaggcucaaaacgaa

SEQ ID NO: 32755 - RNA, 20 nt, Artificial Sequence
  GATA2 Guide RNA
agcccagauccggcgagaaa

SEQ ID NO: 32756 - RNA, 20 nt, Artificial Sequence
  GATA2 Guide RNA
agccccagcccagauccggc

SEQ ID NO: 32757 - RNA, 20 nt, Artificial Sequence
  GATA2 Guide RNA
agccgcgggucaccacguga

SEQ ID NO: 32758 - RNA, 20 nt, Artificial Sequence
  GATA2 Guide RNA
agccuugggcuuuccuccca

SEQ ID NO: 32759 - RNA, 20 nt, Artificial Sequence
  GATA2 Guide RNA
agcgccugacaccccccaaa

SEQ ID NO: 32760 - RNA, 20 nt, Artificial Sequence
  GATA2 Guide RNA
aggaaagcccaaggcucaaa

SEQ ID NO: 32761 - RNA, 20 nt, Artificial Sequence
  GATA2 Guide RNA
aggaaggcgggggagggggu

SEQ ID NO: 32762 - RNA, 20 nt, Artificial Sequence
  GATA2 Guide RNA
aggaagggggagugaggcgu

SEQ ID NO: 32763 - RNA, 20 nt, Artificial Sequence
  GATA2 Guide RNA
aggcgcuggcggcacgccuc

SEQ ID NO: 32764 - RNA, 20 nt, Artificial Sequence
  GATA2 Guide RNA
aggcgggggaggggguucag

SEQ ID NO: 32765 - RNA, 20 nt, Artificial Sequence
  GATA2 Guide RNA
aggcgugccgccagcgccug

SEQ ID NO: 32766 - RNA, 20 nt, Artificial Sequence
  GATA2 Guide RNA
aggcucaaaacgaaaggaag

SEQ ID NO: 32767 - RNA, 20 nt, Artificial Sequence
  GATA2 Guide RNA
agggccguugccgucugcac

SEQ ID NO: 32768 - RNA, 20 nt, Artificial Sequence
  GATA2 Guide RNA
agggggagugaggcgugccg

SEQ ID NO: 32769 - RNA, 20 nt, Artificial Sequence
  GATA2 Guide RNA
aggggguucagccacgcaca

SEQ ID NO: 32770 - RNA, 20 nt, Artificial Sequence
  GATA2 Guide RNA
agggucugggugcagacggc

SEQ ID NO: 32771 - RNA, 20 nt, Artificial Sequence
  GATA2 Guide RNA
aggugucccgcacgccacgg

SEQ ID NO: 32772 - RNA, 20 nt, Artificial Sequence
  GATA2 Guide RNA
agucccaccacgaggugucc

SEQ ID NO: 32773 - RNA, 20 nt, Artificial Sequence
  GATA2 Guide RNA
agucccgggugggaggaaag

SEQ ID NO: 32774 - RNA, 20 nt, Artificial Sequence
  GATA2 Guide RNA
agugaggcgugccgccagcg

SEQ ID NO: 32775 - RNA, 20 nt, Artificial Sequence
  GATA2 Guide RNA
agugugcguggcugaacccc

SEQ ID NO: 32776 - RNA, 20 nt, Artificial Sequence
  GATA2 Guide RNA
auccggcgagaaagagcacc

SEQ ID NO: 32777 - RNA, 20 nt, Artificial Sequence
  GATA2 Guide RNA
aucugggcuggggcuccgug

SEQ ID NO: 32778 - RNA, 20 nt, Artificial Sequence
  GATA2 Guide RNA
auucuggagccgcgggucac

SEQ ID NO: 32779 - RNA, 20 nt, Artificial Sequence
  GATA2 Guide RNA
caaaacgaaaggaaggcggg

SEQ ID NO: 32780 - RNA, 20 nt, Artificial Sequence
  GATA2 Guide RNA
caaagucccaccacgaggug

SEQ ID NO: 32781 - RNA, 20 nt, Artificial Sequence
  GATA2 Guide RNA
caacggcccugcgcgaggaa

SEQ ID NO: 32782 - RNA, 20 nt, Artificial Sequence
  GATA2 Guide RNA
caaggcucaaaacgaaagga

SEQ ID NO: 32783 - RNA, 20 nt, Artificial Sequence
  GATA2 Guide RNA
cacacucacguggugacccg

SEQ ID NO: 32784 - RNA, 20 nt, Artificial Sequence
  GATA2 Guide RNA
caccacgaggugucccgcac

SEQ ID NO: 32785 - RNA, 20 nt, Artificial Sequence
  GATA2 Guide RNA
caccacgugagugugcgugg

SEQ ID NO: 32786 - RNA, 20 nt, Artificial Sequence
  GATA2 Guide RNA
caccagucccgggugggagg

SEQ ID NO: 32787 - RNA, 20 nt, Artificial Sequence
  GATA2 Guide RNA
cacccagacccugagccgcc

SEQ ID NO: 32788 - RNA, 20 nt, Artificial Sequence
  GATA2 Guide RNA
caccccccaaagucccacca

SEQ ID NO: 32789 - RNA, 20 nt, Artificial Sequence
  GATA2 Guide RNA
cacccgggacuggugcucuu

SEQ ID NO: 32790 - RNA, 20 nt, Artificial Sequence
  GATA2 Guide RNA
caccuccauggccggcggcg

SEQ ID NO: 32791 - RNA, 20 nt, Artificial Sequence
  GATA2 Guide RNA
caccucguggugggacuuug

SEQ ID NO: 32792 - RNA, 20 nt, Artificial Sequence
  GATA2 Guide RNA
cacgaggugucccgcacgcc

SEQ ID NO: 32793 - RNA, 20 nt, Artificial Sequence
  GATA2 Guide RNA
cacgcacacucacgugguga

SEQ ID NO: 32794 - RNA, 20 nt, Artificial Sequence
  GATA2 Guide RNA
cacgccacggagccccagcc

SEQ ID NO: 32795 - RNA, 20 nt, Artificial Sequence
  GATA2 Guide RNA
cacgccucacucccccuucc

SEQ ID NO: 32796 - RNA, 20 nt, Artificial Sequence
  GATA2 Guide RNA
cacggagccccagcccagau

SEQ ID NO: 32797 - RNA, 20 nt, Artificial Sequence
  GATA2 Guide RNA
cacgugagugugcguggcug

SEQ ID NO: 32798 - RNA, 20 nt, Artificial Sequence
  GATA2 Guide RNA
cacguggugacccgcggcuc

SEQ ID NO: 32799 - RNA, 20 nt, Artificial Sequence
  GATA2 Guide RNA
cacucacguggugacccgcg

SEQ ID NO: 32800 - RNA, 20 nt, Artificial Sequence
  GATA2 Guide RNA
cacucccccuuccucgcgca

SEQ ID NO: 32801 - RNA, 20 nt, Artificial Sequence
  GATA2 Guide RNA
cagacggcaacggcccugcg

SEQ ID NO: 32802 - RNA, 20 nt, Artificial Sequence
  GATA2 Guide RNA
cagauccggcgagaaagagc

SEQ ID NO: 32803 - RNA, 20 nt, Artificial Sequence
  GATA2 Guide RNA
cagccacgcacacucacgug

SEQ ID NO: 32804 - RNA, 20 nt, Artificial Sequence
  GATA2 Guide RNA
cagcccagauccggcgagaa

SEQ ID NO: 32805 - RNA, 20 nt, Artificial Sequence
  GATA2 Guide RNA
cagcgccugacaccccccaa

SEQ ID NO: 32806 - RNA, 20 nt, Artificial Sequence
  GATA2 Guide RNA
caggcgcuggcggcacgccu

SEQ ID NO: 32807 - RNA, 20 nt, Artificial Sequence
  GATA2 Guide RNA
cagggccguugccgucugca

SEQ ID NO: 32808 - RNA, 20 nt, Artificial Sequence
  GATA2 Guide RNA
cagggucugggugcagacgg

SEQ ID NO: 32809 - RNA, 20 nt, Artificial Sequence
  GATA2 Guide RNA
cagucccgggugggaggaaa

SEQ ID NO: 32810 - RNA, 20 nt, Artificial Sequence
  GATA2 Guide RNA
ccaaagucccaccacgaggu

SEQ ID NO: 32811 - RNA, 20 nt, Artificial Sequence
  GATA2 Guide RNA
ccaaggcucaaaacgaaagg

SEQ ID NO: 32812 - RNA, 20 nt, Artificial Sequence
  GATA2 Guide RNA
ccaccacgaggugucccgca

SEQ ID NO: 32813 - RNA, 20 nt, Artificial Sequence
  GATA2 Guide RNA
ccacccgggacuggugcucu

SEQ ID NO: 32814 - RNA, 20 nt, Artificial Sequence
  GATA2 Guide RNA
ccaccuccauggccggcggc

SEQ ID NO: 32815 - RNA, 20 nt, Artificial Sequence
  GATA2 Guide RNA
ccacgaggugucccgcacgc

SEQ ID NO: 32816 - RNA, 20 nt, Artificial Sequence
  GATA2 Guide RNA
ccacgcacacucacguggug

SEQ ID NO: 32817 - RNA, 20 nt, Artificial Sequence
  GATA2 Guide RNA
ccacggagccccagcccaga

SEQ ID NO: 32818 - RNA, 20 nt, Artificial Sequence
  GATA2 Guide RNA
ccacgugagugugcguggcu

SEQ ID NO: 32819 - RNA, 20 nt, Artificial Sequence
  GATA2 Guide RNA
ccagauccggcgagaaagag

SEQ ID NO: 32820 - RNA, 20 nt, Artificial Sequence
  GATA2 Guide RNA
ccagcccagauccggcgaga

SEQ ID NO: 32821 - RNA, 20 nt, Artificial Sequence
  GATA2 Guide RNA
ccagcgccugacacccccca

SEQ ID NO: 32822 - RNA, 20 nt, Artificial Sequence
  GATA2 Guide RNA
ccagucccgggugggaggaa

SEQ ID NO: 32823 - RNA, 20 nt, Artificial Sequence
  GATA2 Guide RNA
cccaaagucccaccacgagg

SEQ ID NO: 32824 - RNA, 20 nt, Artificial Sequence
  GATA2 Guide RNA
cccaaggcucaaaacgaaag

SEQ ID NO: 32825 - RNA, 20 nt, Artificial Sequence
  GATA2 Guide RNA
cccaccacgaggugucccgc

SEQ ID NO: 32826 - RNA, 20 nt, Artificial Sequence
  GATA2 Guide RNA
cccacccgggacuggugcuc

SEQ ID NO: 32827 - RNA, 20 nt, Artificial Sequence
  GATA2 Guide RNA
cccagauccggcgagaaaga

SEQ ID NO: 32828 - RNA, 20 nt, Artificial Sequence
  GATA2 Guide RNA
cccagcccagauccggcgag

SEQ ID NO: 32829 - RNA, 20 nt, Artificial Sequence
  GATA2 Guide RNA
ccccaaagucccaccacgag

SEQ ID NO: 32830 - RNA, 20 nt, Artificial Sequence
  GATA2 Guide RNA
ccccagcccagauccggcga

SEQ ID NO: 32831 - RNA, 20 nt, Artificial Sequence
  GATA2 Guide RNA
cccccaaagucccaccacga

SEQ ID NO: 32832 - RNA, 20 nt, Artificial Sequence
  GATA2 Guide RNA
ccccccaaagucccaccacg

SEQ ID NO: 32833 - RNA, 20 nt, Artificial Sequence
  GATA2 Guide RNA
cccccgccuuccuuucguuu

SEQ ID NO: 32834 - RNA, 20 nt, Artificial Sequence
  GATA2 Guide RNA
cccccucccccgccuuccuu

SEQ ID NO: 32835 - RNA, 20 nt, Artificial Sequence
  GATA2 Guide RNA
ccccgccuuccuuucguuuu

SEQ ID NO: 32836 - RNA, 20 nt, Artificial Sequence
  GATA2 Guide RNA
ccccucccccgccuuccuuu

SEQ ID NO: 32837 - RNA, 20 nt, Artificial Sequence
  GATA2 Guide RNA
ccccuuccucgcgcagggcc

SEQ ID NO: 32838 - RNA, 20 nt, Artificial Sequence
  GATA2 Guide RNA
cccgccuuccuuucguuuug

SEQ ID NO: 32839 - RNA, 20 nt, Artificial Sequence
  GATA2 Guide RNA
cccgcggcuccagaaucaca

SEQ ID NO: 32840 - RNA, 20 nt, Artificial Sequence
  GATA2 Guide RNA
cccgggacuggugcucuuuc

SEQ ID NO: 32841 - RNA, 20 nt, Artificial Sequence
  GATA2 Guide RNA
cccgggugggaggaaagccc

SEQ ID NO: 32842 - RNA, 20 nt, Artificial Sequence
  GATA2 Guide RNA
cccucccccgccuuccuuuc

SEQ ID NO: 32843 - RNA, 20 nt, Artificial Sequence
  GATA2 Guide RNA
cccugcgcgaggaaggggga

SEQ ID NO: 32844 - RNA, 20 nt, Artificial Sequence
  GATA2 Guide RNA
cccuuccucgcgcagggccg

SEQ ID NO: 32845 - RNA, 20 nt, Artificial Sequence
  GATA2 Guide RNA
ccgcacgccacggagcccca

SEQ ID NO: 32846 - RNA, 20 nt, Artificial Sequence
  GATA2 Guide RNA
ccgccagcgccugacacccc

SEQ ID NO: 32847 - RNA, 20 nt, Artificial Sequence
  GATA2 Guide RNA
ccgccuuccuuucguuuuga

SEQ ID NO: 32848 - RNA, 20 nt, Artificial Sequence
  GATA2 Guide RNA
ccgcgggucaccacgugagu

SEQ ID NO: 32849 - RNA, 20 nt, Artificial Sequence
  GATA2 Guide RNA
ccggaucugggcuggggcuc

SEQ ID NO: 32850 - RNA, 20 nt, Artificial Sequence
  GATA2 Guide RNA
ccggcgagaaagagcaccag

SEQ ID NO: 32851 - RNA, 20 nt, Artificial Sequence
  GATA2 Guide RNA
ccgggacuggugcucuuucu

SEQ ID NO: 32852 - RNA, 20 nt, Artificial Sequence
  GATA2 Guide RNA
ccgggugggaggaaagccca

SEQ ID NO: 32853 - RNA, 20 nt, Artificial Sequence
  GATA2 Guide RNA
ccgucugcacccagacccug

SEQ ID NO: 32854 - RNA, 20 nt, Artificial Sequence
  GATA2 Guide RNA
ccguggcgugcgggacaccu

SEQ ID NO: 32855 - RNA, 20 nt, Artificial Sequence
  GATA2 Guide RNA
ccguugccgucugcacccag

SEQ ID NO: 32856 - RNA, 20 nt, Artificial Sequence
  GATA2 Guide RNA
ccucacucccccuuccucgc

SEQ ID NO: 32857 - RNA, 20 nt, Artificial Sequence
  GATA2 Guide RNA
ccucccacccgggacuggug

SEQ ID NO: 32858 - RNA, 20 nt, Artificial Sequence
  GATA2 Guide RNA
ccucccccgccuuccuuucg

SEQ ID NO: 32859 - RNA, 20 nt, Artificial Sequence
  GATA2 Guide RNA
ccucgcgcagggccguugcc

SEQ ID NO: 32860 - RNA, 20 nt, Artificial Sequence
  GATA2 Guide RNA
ccucguggugggacuuuggg

SEQ ID NO: 32861 - RNA, 20 nt, Artificial Sequence
  GATA2 Guide RNA
ccugacaccccccaaagucc

SEQ ID NO: 32862 - RNA, 20 nt, Artificial Sequence
  GATA2 Guide RNA
ccugcgcgaggaagggggag

SEQ ID NO: 32863 - RNA, 20 nt, Artificial Sequence
  GATA2 Guide RNA
ccuuccucgcgcagggccgu

SEQ ID NO: 32864 - RNA, 20 nt, Artificial Sequence
  GATA2 Guide RNA
ccuuccuuucguuuugagcc

SEQ ID NO: 32865 - RNA, 20 nt, Artificial Sequence
  GATA2 Guide RNA
ccuugggcuuuccucccacc

SEQ ID NO: 32866 - RNA, 20 nt, Artificial Sequence
  GATA2 Guide RNA
ccuuucguuuugagccuugg

SEQ ID NO: 32867 - RNA, 20 nt, Artificial Sequence
  GATA2 Guide RNA
cgaaaggaaggcgggggagg

SEQ ID NO: 32868 - RNA, 20 nt, Artificial Sequence
  GATA2 Guide RNA
cgagaaagagcaccaguccc

SEQ ID NO: 32869 - RNA, 20 nt, Artificial Sequence
  GATA2 Guide RNA
cgaggaagggggagugaggc

SEQ ID NO: 32870 - RNA, 20 nt, Artificial Sequence
  GATA2 Guide RNA
cgaggugucccgcacgccac

SEQ ID NO: 32871 - RNA, 20 nt, Artificial Sequence
  GATA2 Guide RNA
cgcacacucacguggugacc

SEQ ID NO: 32872 - RNA, 20 nt, Artificial Sequence
  GATA2 Guide RNA
cgcacgccacggagccccag

SEQ ID NO: 32873 - RNA, 20 nt, Artificial Sequence
  GATA2 Guide RNA
cgcagggccguugccgucug

SEQ ID NO: 32874 - RNA, 20 nt, Artificial Sequence
  GATA2 Guide RNA
cgccaccuccauggccggcg

SEQ ID NO: 32875 - RNA, 20 nt, Artificial Sequence
  GATA2 Guide RNA
cgccacggagccccagccca

SEQ ID NO: 32876 - RNA, 20 nt, Artificial Sequence
  GATA2 Guide RNA
cgccagcgccugacaccccc

SEQ ID NO: 32877 - RNA, 20 nt, Artificial Sequence
  GATA2 Guide RNA
cgccggaucugggcuggggc

SEQ ID NO: 32878 - RNA, 20 nt, Artificial Sequence
  GATA2 Guide RNA
cgccucacucccccuuccuc

SEQ ID NO: 32879 - RNA, 20 nt, Artificial Sequence
  GATA2 Guide RNA
cgccugacaccccccaaagu

SEQ ID NO: 32880 - RNA, 20 nt, Artificial Sequence
  GATA2 Guide RNA
cgccuuccuuucguuuugag

SEQ ID NO: 32881 - RNA, 20 nt, Artificial Sequence
  GATA2 Guide RNA
cgcgaggaagggggagugag

SEQ ID NO: 32882 - RNA, 20 nt, Artificial Sequence
  GATA2 Guide RNA
cgcgcagggccguugccguc

SEQ ID NO: 32883 - RNA, 20 nt, Artificial Sequence
  GATA2 Guide RNA
cgcgggucaccacgugagug

SEQ ID NO: 32884 - RNA, 20 nt, Artificial Sequence
  GATA2 Guide RNA
cgcuggcggcacgccucacu

SEQ ID NO: 32885 - RNA, 20 nt, Artificial Sequence
  GATA2 Guide RNA
cggagccccagcccagaucc

SEQ ID NO: 32886 - RNA, 20 nt, Artificial Sequence
  GATA2 Guide RNA
cggaucugggcuggggcucc

SEQ ID NO: 32887 - RNA, 20 nt, Artificial Sequence
  GATA2 Guide RNA
cggcaacggcccugcgcgag

SEQ ID NO: 32888 - RNA, 20 nt, Artificial Sequence
  GATA2 Guide RNA
cggcacgccucacucccccu

SEQ ID NO: 32889 - RNA, 20 nt, Artificial Sequence
  GATA2 Guide RNA
cggcccugcgcgaggaaggg

SEQ ID NO: 32890 - RNA, 20 nt, Artificial Sequence
  GATA2 Guide RNA
cggcgagaaagagcaccagu

SEQ ID NO: 32891 - RNA, 20 nt, Artificial Sequence
  GATA2 Guide RNA
cggcggcggcucagggucug

SEQ ID NO: 32892 - RNA, 20 nt, Artificial Sequence
  GATA2 Guide RNA
cggcggcucagggucugggu

SEQ ID NO: 32893 - RNA, 20 nt, Artificial Sequence
  GATA2 Guide RNA
cggcucagggucugggugca

SEQ ID NO: 32894 - RNA, 20 nt, Artificial Sequence
  GATA2 Guide RNA
cgggacaccucgugguggga

SEQ ID NO: 32895 - RNA, 20 nt, Artificial Sequence
  GATA2 Guide RNA
cgggacuggugcucuuucuc

SEQ ID NO: 32896 - RNA, 20 nt, Artificial Sequence
  GATA2 Guide RNA
cgggggaggggguucagcca

SEQ ID NO: 32897 - RNA, 20 nt, Artificial Sequence
  GATA2 Guide RNA
cgggucaccacgugagugug

SEQ ID NO: 32898 - RNA, 20 nt, Artificial Sequence
  GATA2 Guide RNA
cgggugggaggaaagcccaa

SEQ ID NO: 32899 - RNA, 20 nt, Artificial Sequence
  GATA2 Guide RNA
cgucugcacccagacccuga

SEQ ID NO: 32900 - RNA, 20 nt, Artificial Sequence
  GATA2 Guide RNA
cgugagugugcguggcugaa

SEQ ID NO: 32901 - RNA, 20 nt, Artificial Sequence
  GATA2 Guide RNA
cgugccgccagcgccugaca

SEQ ID NO: 32902 - RNA, 20 nt, Artificial Sequence
  GATA2 Guide RNA
cgugcgggacaccucguggu

SEQ ID NO: 32903 - RNA, 20 nt, Artificial Sequence
  GATA2 Guide RNA
cguggcgugcgggacaccuc

SEQ ID NO: 32904 - RNA, 20 nt, Artificial Sequence
  GATA2 Guide RNA
cguggcugaacccccucccc

SEQ ID NO: 32905 - RNA, 20 nt, Artificial Sequence
  GATA2 Guide RNA
cguggugacccgcggcucca

SEQ ID NO: 32906 - RNA, 20 nt, Artificial Sequence
  GATA2 Guide RNA
cguggugggacuuugggggg

SEQ ID NO: 32907 - RNA, 20 nt, Artificial Sequence
  GATA2 Guide RNA
cguugccgucugcacccaga

SEQ ID NO: 32908 - RNA, 20 nt, Artificial Sequence
  GATA2 Guide RNA
cguuuugagccuugggcuuu

SEQ ID NO: 32909 - RNA, 20 nt, Artificial Sequence
  GATA2 Guide RNA
cucaaaacgaaaggaaggcg

SEQ ID NO: 32910 - RNA, 20 nt, Artificial Sequence
  GATA2 Guide RNA
cucacguggugacccgcggc

SEQ ID NO: 32911 - RNA, 20 nt, Artificial Sequence
  GATA2 Guide RNA
cucacucccccuuccucgcg

SEQ ID NO: 32912 - RNA, 20 nt, Artificial Sequence
  GATA2 Guide RNA
cucagggucugggugcagac

SEQ ID NO: 32913 - RNA, 20 nt, Artificial Sequence
  GATA2 Guide RNA
cucccacccgggacuggugc

SEQ ID NO: 32914 - RNA, 20 nt, Artificial Sequence
  GATA2 Guide RNA
cucccccgccuuccuuucgu

SEQ ID NO: 32915 - RNA, 20 nt, Artificial Sequence
  GATA2 Guide RNA
cuccguggcgugcgggacac

SEQ ID NO: 32916 - RNA, 20 nt, Artificial Sequence
  GATA2 Guide RNA
cucgccggaucugggcuggg

SEQ ID NO: 32917 - RNA, 20 nt, Artificial Sequence
  GATA2 Guide RNA
cucgcgcagggccguugccg

SEQ ID NO: 32918 - RNA, 20 nt, Artificial Sequence
  GATA2 Guide RNA
cucguggugggacuuugggg

SEQ ID NO: 32919 - RNA, 20 nt, Artificial Sequence
  GATA2 Guide RNA
cucuuucucgccggaucugg

SEQ ID NO: 32920 - RNA, 20 nt, Artificial Sequence
  GATA2 Guide RNA
cugaacccccucccccgccu

SEQ ID NO: 32921 - RNA, 20 nt, Artificial Sequence
  GATA2 Guide RNA
cugacaccccccaaaguccc

SEQ ID NO: 32922 - RNA, 20 nt, Artificial Sequence
  GATA2 Guide RNA
cugcacccagacccugagcc

SEQ ID NO: 32923 - RNA, 20 nt, Artificial Sequence
  GATA2 Guide RNA
cugcgcgaggaagggggagu

SEQ ID NO: 32924 - RNA, 20 nt, Artificial Sequence
  GATA2 Guide RNA
cuggagccgcgggucaccac

SEQ ID NO: 32925 - RNA, 20 nt, Artificial Sequence
  GATA2 Guide RNA
cuggcggcacgccucacucc

SEQ ID NO: 32926 - RNA, 20 nt, Artificial Sequence
  GATA2 Guide RNA
cugggcuggggcuccguggc

SEQ ID NO: 32927 - RNA, 20 nt, Artificial Sequence
  GATA2 Guide RNA
cuggggcuccguggcgugcg

SEQ ID NO: 32928 - RNA, 20 nt, Artificial Sequence
  GATA2 Guide RNA
cugggugcagacggcaacgg

SEQ ID NO: 32929 - RNA, 20 nt, Artificial Sequence
  GATA2 Guide RNA
cuggugcucuuucucgccgg

SEQ ID NO: 32930 - RNA, 20 nt, Artificial Sequence
  GATA2 Guide RNA
cuuccucgcgcagggccguu

SEQ ID NO: 32931 - RNA, 20 nt, Artificial Sequence
  GATA2 Guide RNA
cuuccuuucguuuugagccu

SEQ ID NO: 32932 - RNA, 20 nt, Artificial Sequence
  GATA2 Guide RNA
cuugggcuuuccucccaccc

SEQ ID NO: 32933 - RNA, 20 nt, Artificial Sequence
  GATA2 Guide RNA
cuuuccucccacccgggacu

SEQ ID NO: 32934 - RNA, 20 nt, Artificial Sequence
  GATA2 Guide RNA
cuuucguuuugagccuuggg

SEQ ID NO: 32935 - RNA, 20 nt, Artificial Sequence
  GATA2 Guide RNA
cuuucucgccggaucugggc

SEQ ID NO: 32936 - RNA, 20 nt, Artificial Sequence
  GATA2 Guide RNA
cuuuggggggugucaggcgc

SEQ ID NO: 32937 - RNA, 20 nt, Artificial Sequence
  GATA2 Guide RNA
gaaagagcaccagucccggg

SEQ ID NO: 32938 - RNA, 20 nt, Artificial Sequence
  GATA2 Guide RNA
gaaagcccaaggcucaaaac

SEQ ID NO: 32939 - RNA, 20 nt, Artificial Sequence
  GATA2 Guide RNA
gaaaggaaggcgggggaggg

SEQ ID NO: 32940 - RNA, 20 nt, Artificial Sequence
  GATA2 Guide RNA
gaacccccucccccgccuuc

SEQ ID NO: 32941 - RNA, 20 nt, Artificial Sequence
  GATA2 Guide RNA
gaaggcgggggaggggguuc

SEQ ID NO: 32942 - RNA, 20 nt, Artificial Sequence
  GATA2 Guide RNA
gaagggggagugaggcgugc

SEQ ID NO: 32943 - RNA, 20 nt, Artificial Sequence
  GATA2 Guide RNA
gacaccccccaaagucccac

SEQ ID NO: 32944 - RNA, 20 nt, Artificial Sequence
  GATA2 Guide RNA
gacaccucguggugggacuu

SEQ ID NO: 32945 - RNA, 20 nt, Artificial Sequence
  GATA2 Guide RNA
gacccgcggcuccagaauca

SEQ ID NO: 32946 - RNA, 20 nt, Artificial Sequence
  GATA2 Guide RNA
gacggcaacggcccugcgcg

SEQ ID NO: 32947 - RNA, 20 nt, Artificial Sequence
  GATA2 Guide RNA
gacuggugcucuuucucgcc

SEQ ID NO: 32948 - RNA, 20 nt, Artificial Sequence
  GATA2 Guide RNA
gacuuuggggggugucaggc

SEQ ID NO: 32949 - RNA, 20 nt, Artificial Sequence
  GATA2 Guide RNA
gagaaagagcaccagucccg

SEQ ID NO: 32950 - RNA, 20 nt, Artificial Sequence
  GATA2 Guide RNA
gagcaccagucccggguggg

SEQ ID NO: 32951 - RNA, 20 nt, Artificial Sequence
  GATA2 Guide RNA
gagccccagcccagauccgg

SEQ ID NO: 32952 - RNA, 20 nt, Artificial Sequence
  GATA2 Guide RNA
gagccgcgggucaccacgug

SEQ ID NO: 32953 - RNA, 20 nt, Artificial Sequence
  GATA2 Guide RNA
gagccuugggcuuuccuccc

SEQ ID NO: 32954 - RNA, 20 nt, Artificial Sequence
  GATA2 Guide RNA
gaggaaagcccaaggcucaa

SEQ ID NO: 32955 - RNA, 20 nt, Artificial Sequence
  GATA2 Guide RNA
gaggaagggggagugaggcg

SEQ ID NO: 32956 - RNA, 20 nt, Artificial Sequence
  GATA2 Guide RNA
gaggcgugccgccagcgccu

SEQ ID NO: 32957 - RNA, 20 nt, Artificial Sequence
  GATA2 Guide RNA
gaggggguucagccacgcac

SEQ ID NO: 32958 - RNA, 20 nt, Artificial Sequence
  GATA2 Guide RNA
gaggugucccgcacgccacg

SEQ ID NO: 32959 - RNA, 20 nt, Artificial Sequence
  GATA2 Guide RNA
gagugaggcgugccgccagc

SEQ ID NO: 32960 - RNA, 20 nt, Artificial Sequence
  GATA2 Guide RNA
gagugugcguggcugaaccc

SEQ ID NO: 32961 - RNA, 20 nt, Artificial Sequence
  GATA2 Guide RNA
gauccggcgagaaagagcac

SEQ ID NO: 32962 - RNA, 20 nt, Artificial Sequence
  GATA2 Guide RNA
gaucugggcuggggcuccgu

SEQ ID NO: 32963 - RNA, 20 nt, Artificial Sequence
  GATA2 Guide RNA
gauucuggagccgcggguca

SEQ ID NO: 32964 - RNA, 20 nt, Artificial Sequence
  GATA2 Guide RNA
gcaacggcccugcgcgagga

SEQ ID NO: 32965 - RNA, 20 nt, Artificial Sequence
  GATA2 Guide RNA
gcacacucacguggugaccc

SEQ ID NO: 32966 - RNA, 20 nt, Artificial Sequence
  GATA2 Guide RNA
gcaccagucccgggugggag

SEQ ID NO: 32967 - RNA, 20 nt, Artificial Sequence
  GATA2 Guide RNA
gcacccagacccugagccgc

SEQ ID NO: 32968 - RNA, 20 nt, Artificial Sequence
  GATA2 Guide RNA
gcacgccacggagccccagc

SEQ ID NO: 32969 - RNA, 20 nt, Artificial Sequence
  GATA2 Guide RNA
gcacgccucacucccccuuc

SEQ ID NO: 32970 - RNA, 20 nt, Artificial Sequence
  GATA2 Guide RNA
gcagacggcaacggcccugc

SEQ ID NO: 32971 - RNA, 20 nt, Artificial Sequence
  GATA2 Guide RNA
gcagggccguugccgucugc

SEQ ID NO: 32972 - RNA, 20 nt, Artificial Sequence
  GATA2 Guide RNA
gccaccuccauggccggcgg

SEQ ID NO: 32973 - RNA, 20 nt, Artificial Sequence
  GATA2 Guide RNA
gccacgcacacucacguggu

SEQ ID NO: 32974 - RNA, 20 nt, Artificial Sequence
  GATA2 Guide RNA
gccacggagccccagcccag

SEQ ID NO: 32975 - RNA, 20 nt, Artificial Sequence
  GATA2 Guide RNA
gccagcgccugacacccccc

SEQ ID NO: 32976 - RNA, 20 nt, Artificial Sequence
  GATA2 Guide RNA
gcccaaggcucaaaacgaaa

SEQ ID NO: 32977 - RNA, 20 nt, Artificial Sequence
  GATA2 Guide RNA
gcccagauccggcgagaaag

SEQ ID NO: 32978 - RNA, 20 nt, Artificial Sequence
  GATA2 Guide RNA
gccccagcccagauccggcg

SEQ ID NO: 32979 - RNA, 20 nt, Artificial Sequence
  GATA2 Guide RNA
gcccugcgcgaggaaggggg

SEQ ID NO: 32980 - RNA, 20 nt, Artificial Sequence
  GATA2 Guide RNA
gccgccagcgccugacaccc

SEQ ID NO: 32981 - RNA, 20 nt, Artificial Sequence
  GATA2 Guide RNA
gccgcgggucaccacgugag

SEQ ID NO: 32982 - RNA, 20 nt, Artificial Sequence
  GATA2 Guide RNA
gccggaucugggcuggggcu

SEQ ID NO: 32983 - RNA, 20 nt, Artificial Sequence
  GATA2 Guide RNA
gccgucugcacccagacccu

SEQ ID NO: 32984 - RNA, 20 nt, Artificial Sequence
  GATA2 Guide RNA
gccguugccgucugcaccca

SEQ ID NO: 32985 - RNA, 20 nt, Artificial Sequence
  GATA2 Guide RNA
gccucacucccccuuccucg

SEQ ID NO: 32986 - RNA, 20 nt, Artificial Sequence
  GATA2 Guide RNA
gccugacaccccccaaaguc

SEQ ID NO: 32987 - RNA, 20 nt, Artificial Sequence
  GATA2 Guide RNA
gccuuccuuucguuuugagc

SEQ ID NO: 32988 - RNA, 20 nt, Artificial Sequence
  GATA2 Guide RNA
gccuugggcuuuccucccac

SEQ ID NO: 32989 - RNA, 20 nt, Artificial Sequence
  GATA2 Guide RNA
gcgagaaagagcaccagucc

SEQ ID NO: 32990 - RNA, 20 nt, Artificial Sequence
  GATA2 Guide RNA
gcgaggaagggggagugagg

SEQ ID NO: 32991 - RNA, 20 nt, Artificial Sequence
  GATA2 Guide RNA
gcgcagggccguugccgucu

SEQ ID NO: 32992 - RNA, 20 nt, Artificial Sequence
  GATA2 Guide RNA
gcgccaccuccauggccggc

SEQ ID NO: 32993 - RNA, 20 nt, Artificial Sequence
  GATA2 Guide RNA
gcgccugacaccccccaaag

SEQ ID NO: 32994 - RNA, 20 nt, Artificial Sequence
  GATA2 Guide RNA
gcgcgaggaagggggaguga

SEQ ID NO: 32995 - RNA, 20 nt, Artificial Sequence
  GATA2 Guide RNA
gcgcuggcggcacgccucac

SEQ ID NO: 32996 - RNA, 20 nt, Artificial Sequence
  GATA2 Guide RNA
gcggcacgccucacuccccc

SEQ ID NO: 32997 - RNA, 20 nt, Artificial Sequence
  GATA2 Guide RNA
gcggcggcggcucagggucu

SEQ ID NO: 32998 - RNA, 20 nt, Artificial Sequence
  GATA2 Guide RNA
gcggcggcucagggucuggg

SEQ ID NO: 32999 - RNA, 20 nt, Artificial Sequence
  GATA2 Guide RNA
gcggcucagggucugggugc

SEQ ID NO: 33000 - RNA, 20 nt, Artificial Sequence
  GATA2 Guide RNA
gcgggacaccucgugguggg

SEQ ID NO: 33001 - RNA, 20 nt, Artificial Sequence
  GATA2 Guide RNA
gcgggggaggggguucagcc

SEQ ID NO: 33002 - RNA, 20 nt, Artificial Sequence
  GATA2 Guide RNA
gcgggucaccacgugagugu

SEQ ID NO: 33003 - RNA, 20 nt, Artificial Sequence
  GATA2 Guide RNA
gcgugccgccagcgccugac

SEQ ID NO: 33004 - RNA, 20 nt, Artificial Sequence
  GATA2 Guide RNA
gcgugcgggacaccucgugg

SEQ ID NO: 33005 - RNA, 20 nt, Artificial Sequence
  GATA2 Guide RNA
gcguggcugaacccccuccc

SEQ ID NO: 33006 - RNA, 20 nt, Artificial Sequence
  GATA2 Guide RNA
gcucaaaacgaaaggaaggc

SEQ ID NO: 33007 - RNA, 20 nt, Artificial Sequence
  GATA2 Guide RNA
gcucagggucugggugcaga

SEQ ID NO: 33008 - RNA, 20 nt, Artificial Sequence
  GATA2 Guide RNA
gcuccguggcgugcgggaca

SEQ ID NO: 33009 - RNA, 20 nt, Artificial Sequence
  GATA2 Guide RNA
gcucuuucucgccggaucug

SEQ ID NO: 33010 - RNA, 20 nt, Artificial Sequence
  GATA2 Guide RNA
gcugaacccccucccccgcc

SEQ ID NO: 33011 - RNA, 20 nt, Artificial Sequence
  GATA2 Guide RNA
gcuggcggcacgccucacuc

SEQ ID NO: 33012 - RNA, 20 nt, Artificial Sequence
  GATA2 Guide RNA
gcuggggcuccguggcgugc

SEQ ID NO: 33013 - RNA, 20 nt, Artificial Sequence
  GATA2 Guide RNA
gcuuuccucccacccgggac

SEQ ID NO: 33014 - RNA, 20 nt, Artificial Sequence
  GATA2 Guide RNA
ggaaagcccaaggcucaaaa

SEQ ID NO: 33015 - RNA, 20 nt, Artificial Sequence
  GATA2 Guide RNA
ggaaggcgggggaggggguu

SEQ ID NO: 33016 - RNA, 20 nt, Artificial Sequence
  GATA2 Guide RNA
ggaagggggagugaggcgug

SEQ ID NO: 33017 - RNA, 20 nt, Artificial Sequence
  GATA2 Guide RNA
ggacaccucguggugggacu

SEQ ID NO: 33018 - RNA, 20 nt, Artificial Sequence
  GATA2 Guide RNA
ggacuggugcucuuucucgc

SEQ ID NO: 33019 - RNA, 20 nt, Artificial Sequence
  GATA2 Guide RNA
ggacuuuggggggugucagg

SEQ ID NO: 33020 - RNA, 20 nt, Artificial Sequence
  GATA2 Guide RNA
ggagccccagcccagauccg

SEQ ID NO: 33021 - RNA, 20 nt, Artificial Sequence
  GATA2 Guide RNA
ggagccgcgggucaccacgu

SEQ ID NO: 33022 - RNA, 20 nt, Artificial Sequence
  GATA2 Guide RNA
ggaggaaagcccaaggcuca

SEQ ID NO: 33023 - RNA, 20 nt, Artificial Sequence
  GATA2 Guide RNA
ggaggggguucagccacgca

SEQ ID NO: 33024 - RNA, 20 nt, Artificial Sequence
  GATA2 Guide RNA
ggagugaggcgugccgccag

SEQ ID NO: 33025 - RNA, 20 nt, Artificial Sequence
  GATA2 Guide RNA
ggaucugggcuggggcuccg

SEQ ID NO: 33026 - RNA, 20 nt, Artificial Sequence
  GATA2 Guide RNA
ggcaacggcccugcgcgagg

SEQ ID NO: 33027 - RNA, 20 nt, Artificial Sequence
  GATA2 Guide RNA
ggcacgccucacucccccuu

SEQ ID NO: 33028 - RNA, 20 nt, Artificial Sequence
  GATA2 Guide RNA
ggcccugcgcgaggaagggg

SEQ ID NO: 33029 - RNA, 20 nt, Artificial Sequence
  GATA2 Guide RNA
ggccguugccgucugcaccc

SEQ ID NO: 33030 - RNA, 20 nt, Artificial Sequence
  GATA2 Guide RNA
ggcgagaaagagcaccaguc

SEQ ID NO: 33031 - RNA, 20 nt, Artificial Sequence
  GATA2 Guide RNA
ggcgccaccuccauggccgg

SEQ ID NO: 33032 - RNA, 20 nt, Artificial Sequence
  GATA2 Guide RNA
ggcgcuggcggcacgccuca

SEQ ID NO: 33033 - RNA, 20 nt, Artificial Sequence
  GATA2 Guide RNA
ggcggcacgccucacucccc

SEQ ID NO: 33034 - RNA, 20 nt, Artificial Sequence
  GATA2 Guide RNA
ggcggcggcucagggucugg

SEQ ID NO: 33035 - RNA, 20 nt, Artificial Sequence
  GATA2 Guide RNA
ggcggcucagggucugggug

SEQ ID NO: 33036 - RNA, 20 nt, Artificial Sequence
  GATA2 Guide RNA
ggcgggggaggggguucagc

SEQ ID NO: 33037 - RNA, 20 nt, Artificial Sequence
  GATA2 Guide RNA
ggcgugccgccagcgccuga

SEQ ID NO: 33038 - RNA, 20 nt, Artificial Sequence
  GATA2 Guide RNA
ggcgugcgggacaccucgug

SEQ ID NO: 33039 - RNA, 20 nt, Artificial Sequence
  GATA2 Guide RNA
ggcucaaaacgaaaggaagg

SEQ ID NO: 33040 - RNA, 20 nt, Artificial Sequence
  GATA2 Guide RNA
ggcucagggucugggugcag

SEQ ID NO: 33041 - RNA, 20 nt, Artificial Sequence
  GATA2 Guide RNA
ggcuccguggcgugcgggac

SEQ ID NO: 33042 - RNA, 20 nt, Artificial Sequence
  GATA2 Guide RNA
ggcugaacccccucccccgc

SEQ ID NO: 33043 - RNA, 20 nt, Artificial Sequence
  GATA2 Guide RNA
ggcuggggcuccguggcgug

SEQ ID NO: 33044 - RNA, 20 nt, Artificial Sequence
  GATA2 Guide RNA
ggcuuuccucccacccggga

SEQ ID NO: 33045 - RNA, 20 nt, Artificial Sequence
  GATA2 Guide RNA
gggacaccucguggugggac

SEQ ID NO: 33046 - RNA, 20 nt, Artificial Sequence
  GATA2 Guide RNA
gggacuggugcucuuucucg

SEQ ID NO: 33047 - RNA, 20 nt, Artificial Sequence
  GATA2 Guide RNA
gggacuuuggggggugucag

SEQ ID NO: 33048 - RNA, 20 nt, Artificial Sequence
  GATA2 Guide RNA
gggaggaaagcccaaggcuc

SEQ ID NO: 33049 - RNA, 20 nt, Artificial Sequence
  GATA2 Guide RNA
gggaggggguucagccacgc

SEQ ID NO: 33050 - RNA, 20 nt, Artificial Sequence
  GATA2 Guide RNA
gggagugaggcgugccgcca

SEQ ID NO: 33051 - RNA, 20 nt, Artificial Sequence
  GATA2 Guide RNA
gggccguugccgucugcacc

SEQ ID NO: 33052 - RNA, 20 nt, Artificial Sequence
  GATA2 Guide RNA
gggcuccguggcgugcggga

SEQ ID NO: 33053 - RNA, 20 nt, Artificial Sequence
  GATA2 Guide RNA
gggcuggggcuccguggcgu

SEQ ID NO: 33054 - RNA, 20 nt, Artificial Sequence
  GATA2 Guide RNA
gggcuuuccucccacccggg

SEQ ID NO: 33055 - RNA, 20 nt, Artificial Sequence
  GATA2 Guide RNA
ggggaggggguucagccacg

SEQ ID NO: 33056 - RNA, 20 nt, Artificial Sequence
  GATA2 Guide RNA
ggggagugaggcgugccgcc

SEQ ID NO: 33057 - RNA, 20 nt, Artificial Sequence
  GATA2 Guide RNA
gggggaggggguucagccac

SEQ ID NO: 33058 - RNA, 20 nt, Artificial Sequence
  GATA2 Guide RNA
gggggagugaggcgugccgc

SEQ ID NO: 33059 - RNA, 20 nt, Artificial Sequence
  GATA2 Guide RNA
ggggggugucaggcgcuggc

SEQ ID NO: 33060 - RNA, 20 nt, Artificial Sequence
  GATA2 Guide RNA
gggggugucaggcgcuggcg

SEQ ID NO: 33061 - RNA, 20 nt, Artificial Sequence
  GATA2 Guide RNA
ggggguucagccacgcacac

SEQ ID NO: 33062 - RNA, 20 nt, Artificial Sequence
  GATA2 Guide RNA
ggggugucaggcgcuggcgg

SEQ ID NO: 33063 - RNA, 20 nt, Artificial Sequence
  GATA2 Guide RNA
gggguucagccacgcacacu

SEQ ID NO: 33064 - RNA, 20 nt, Artificial Sequence
  GATA2 Guide RNA
gggucaccacgugagugugc

SEQ ID NO: 33065 - RNA, 20 nt, Artificial Sequence
  GATA2 Guide RNA
gggugcagacggcaacggcc

SEQ ID NO: 33066 - RNA, 20 nt, Artificial Sequence
  GATA2 Guide RNA
gggugggaggaaagcccaag

SEQ ID NO: 33067 - RNA, 20 nt, Artificial Sequence
  GATA2 Guide RNA
gggugucaggcgcuggcggc

SEQ ID NO: 33068 - RNA, 20 nt, Artificial Sequence
  GATA2 Guide RNA
ggguucagccacgcacacuc

SEQ ID NO: 33069 - RNA, 20 nt, Artificial Sequence
  GATA2 Guide RNA
ggucaccacgugagugugcg

SEQ ID NO: 33070 - RNA, 20 nt, Artificial Sequence
  GATA2 Guide RNA
ggugacccgcggcuccagaa

SEQ ID NO: 33071 - RNA, 20 nt, Artificial Sequence
  GATA2 Guide RNA
ggugcagacggcaacggccc

SEQ ID NO: 33072 - RNA, 20 nt, Artificial Sequence
  GATA2 Guide RNA
ggugcucuuucucgccggau

SEQ ID NO: 33073 - RNA, 20 nt, Artificial Sequence
  GATA2 Guide RNA
ggugggacuuuggggggugu

SEQ ID NO: 33074 - RNA, 20 nt, Artificial Sequence
  GATA2 Guide RNA
ggugggaggaaagcccaagg

SEQ ID NO: 33075 - RNA, 20 nt, Artificial Sequence
  GATA2 Guide RNA
ggugucaggcgcuggcggca

SEQ ID NO: 33076 - RNA, 20 nt, Artificial Sequence
  GATA2 Guide RNA
ggugucccgcacgccacgga

SEQ ID NO: 33077 - RNA, 20 nt, Artificial Sequence
  GATA2 Guide RNA
ggugugugauucuggagccg

SEQ ID NO: 33078 - RNA, 20 nt, Artificial Sequence
  GATA2 Guide RNA
gguucagccacgcacacuca

SEQ ID NO: 33079 - RNA, 20 nt, Artificial Sequence
  GATA2 Guide RNA
gucaccacgugagugugcgu

SEQ ID NO: 33080 - RNA, 20 nt, Artificial Sequence
  GATA2 Guide RNA
gucaggcgcuggcggcacgc

SEQ ID NO: 33081 - RNA, 20 nt, Artificial Sequence
  GATA2 Guide RNA
gucccaccacgagguguccc

SEQ ID NO: 33082 - RNA, 20 nt, Artificial Sequence
  GATA2 Guide RNA
gucccgcacgccacggagcc

SEQ ID NO: 33083 - RNA, 20 nt, Artificial Sequence
  GATA2 Guide RNA
gucccgggugggaggaaagc

SEQ ID NO: 33084 - RNA, 20 nt, Artificial Sequence
  GATA2 Guide RNA
gucugcacccagacccugag

SEQ ID NO: 33085 - RNA, 20 nt, Artificial Sequence
  GATA2 Guide RNA
gugacccgcggcuccagaau

SEQ ID NO: 33086 - RNA, 20 nt, Artificial Sequence
  GATA2 Guide RNA
gugaggcgugccgccagcgc

SEQ ID NO: 33087 - RNA, 20 nt, Artificial Sequence
  GATA2 Guide RNA
gugagugugcguggcugaac

SEQ ID NO: 33088 - RNA, 20 nt, Artificial Sequence
  GATA2 Guide RNA
gugauucuggagccgcgggu

SEQ ID NO: 33089 - RNA, 20 nt, Artificial Sequence
  GATA2 Guide RNA
gugcagacggcaacggcccu

SEQ ID NO: 33090 - RNA, 20 nt, Artificial Sequence
  GATA2 Guide RNA
gugccgccagcgccugacac

SEQ ID NO: 33091 - RNA, 20 nt, Artificial Sequence
  GATA2 Guide RNA
gugcgggacaccucguggug

SEQ ID NO: 33092 - RNA, 20 nt, Artificial Sequence
  GATA2 Guide RNA
gugcguggcugaacccccuc

SEQ ID NO: 33093 - RNA, 20 nt, Artificial Sequence
  GATA2 Guide RNA
gugcucuuucucgccggauc

SEQ ID NO: 33094 - RNA, 20 nt, Artificial Sequence
  GATA2 Guide RNA
guggcgugcgggacaccucg

SEQ ID NO: 33095 - RNA, 20 nt, Artificial Sequence
  GATA2 Guide RNA
guggcugaacccccuccccc

SEQ ID NO: 33096 - RNA, 20 nt, Artificial Sequence
  GATA2 Guide RNA
gugggacuuugggggguguc

SEQ ID NO: 33097 - RNA, 20 nt, Artificial Sequence
  GATA2 Guide RNA
gugggaggaaagcccaaggc

SEQ ID NO: 33098 - RNA, 20 nt, Artificial Sequence
  GATA2 Guide RNA
guggugacccgcggcuccag

SEQ ID NO: 33099 - RNA, 20 nt, Artificial Sequence
  GATA2 Guide RNA
guggugggacuuuggggggu

SEQ ID NO: 33100 - RNA, 20 nt, Artificial Sequence
  GATA2 Guide RNA
gugucaggcgcuggcggcac

SEQ ID NO: 33101 - RNA, 20 nt, Artificial Sequence
  GATA2 Guide RNA
gugucccgcacgccacggag

SEQ ID NO: 33102 - RNA, 20 nt, Artificial Sequence
  GATA2 Guide RNA
gugugauucuggagccgcgg

SEQ ID NO: 33103 - RNA, 20 nt, Artificial Sequence
  GATA2 Guide RNA
gugugcguggcugaaccccc

SEQ ID NO: 33104 - RNA, 20 nt, Artificial Sequence
  GATA2 Guide RNA
gugugugauucuggagccgc

SEQ ID NO: 33105 - RNA, 20 nt, Artificial Sequence
  GATA2 Guide RNA
guucagccacgcacacucac

SEQ ID NO: 33106 - RNA, 20 nt, Artificial Sequence
  GATA2 Guide RNA
guugccgucugcacccagac

SEQ ID NO: 33107 - RNA, 20 nt, Artificial Sequence
  GATA2 Guide RNA
guuuugagccuugggcuuuc

SEQ ID NO: 33108 - RNA, 20 nt, Artificial Sequence
  GATA2 Guide RNA
ucaaaacgaaaggaaggcgg

SEQ ID NO: 33109 - RNA, 20 nt, Artificial Sequence
  GATA2 Guide RNA
ucaccacgugagugugcgug

SEQ ID NO: 33110 - RNA, 20 nt, Artificial Sequence
  GATA2 Guide RNA
ucacguggugacccgcggcu

SEQ ID NO: 33111 - RNA, 20 nt, Artificial Sequence
  GATA2 Guide RNA
ucacucccccuuccucgcgc

SEQ ID NO: 33112 - RNA, 20 nt, Artificial Sequence
  GATA2 Guide RNA
ucagccacgcacacucacgu

SEQ ID NO: 33113 - RNA, 20 nt, Artificial Sequence
  GATA2 Guide RNA
ucaggcgcuggcggcacgcc

SEQ ID NO: 33114 - RNA, 20 nt, Artificial Sequence
  GATA2 Guide RNA
ucagggucugggugcagacg

SEQ ID NO: 33115 - RNA, 20 nt, Artificial Sequence
  GATA2 Guide RNA
ucccaccacgaggugucccg

SEQ ID NO: 33116 - RNA, 20 nt, Artificial Sequence
  GATA2 Guide RNA
ucccacccgggacuggugcu

SEQ ID NO: 33117 - RNA, 20 nt, Artificial Sequence
  GATA2 Guide RNA
ucccccgccuuccuuucguu

SEQ ID NO: 33118 - RNA, 20 nt, Artificial Sequence
  GATA2 Guide RNA
ucccgcacgccacggagccc

SEQ ID NO: 33119 - RNA, 20 nt, Artificial Sequence
  GATA2 Guide RNA
ucccgggugggaggaaagcc

SEQ ID NO: 33120 - RNA, 20 nt, Artificial Sequence
  GATA2 Guide RNA
uccggcgagaaagagcacca

SEQ ID NO: 33121 - RNA, 20 nt, Artificial Sequence
  GATA2 Guide RNA
uccguggcgugcgggacacc

SEQ ID NO: 33122 - RNA, 20 nt, Artificial Sequence
  GATA2 Guide RNA
uccucccacccgggacuggu

SEQ ID NO: 33123 - RNA, 20 nt, Artificial Sequence
  GATA2 Guide RNA
uccucgcgcagggccguugc

SEQ ID NO: 33124 - RNA, 20 nt, Artificial Sequence
  GATA2 Guide RNA
uccuuucguuuugagccuug

SEQ ID NO: 33125 - RNA, 20 nt, Artificial Sequence
  GATA2 Guide RNA
ucgccggaucugggcugggg

SEQ ID NO: 33126 - RNA, 20 nt, Artificial Sequence
  GATA2 Guide RNA
ucgcgcagggccguugccgu

SEQ ID NO: 33127 - RNA, 20 nt, Artificial Sequence
  GATA2 Guide RNA
ucguggugggacuuuggggg

SEQ ID NO: 33128 - RNA, 20 nt, Artificial Sequence
  GATA2 Guide RNA
ucguuuugagccuugggcuu

SEQ ID NO: 33129 - RNA, 20 nt, Artificial Sequence
  GATA2 Guide RNA
ucucgccggaucugggcugg

SEQ ID NO: 33130 - RNA, 20 nt, Artificial Sequence
  GATA2 Guide RNA
ucugcacccagacccugagc

SEQ ID NO: 33131 - RNA, 20 nt, Artificial Sequence
  GATA2 Guide RNA
ucuggagccgcgggucacca

SEQ ID NO: 33132 - RNA, 20 nt, Artificial Sequence
  GATA2 Guide RNA
ucugggcuggggcuccgugg

SEQ ID NO: 33133 - RNA, 20 nt, Artificial Sequence
  GATA2 Guide RNA
ucugggugcagacggcaacg

SEQ ID NO: 33134 - RNA, 20 nt, Artificial Sequence
  GATA2 Guide RNA
ucuuucucgccggaucuggg

SEQ ID NO: 33135 - RNA, 20 nt, Artificial Sequence
  GATA2 Guide RNA
ugaacccccucccccgccuu

SEQ ID NO: 33136 - RNA, 20 nt, Artificial Sequence
  GATA2 Guide RNA
ugacaccccccaaaguccca

SEQ ID NO: 33137 - RNA, 20 nt, Artificial Sequence
  GATA2 Guide RNA
ugacccgcggcuccagaauc

SEQ ID NO: 33138 - RNA, 20 nt, Artificial Sequence
  GATA2 Guide RNA
ugagccuugggcuuuccucc

SEQ ID NO: 33139 - RNA, 20 nt, Artificial Sequence
  GATA2 Guide RNA
ugaggcgugccgccagcgcc

SEQ ID NO: 33140 - RNA, 20 nt, Artificial Sequence
  GATA2 Guide RNA
ugagugugcguggcugaacc

SEQ ID NO: 33141 - RNA, 20 nt, Artificial Sequence
  GATA2 Guide RNA
ugauucuggagccgcggguc

SEQ ID NO: 33142 - RNA, 20 nt, Artificial Sequence
  GATA2 Guide RNA
ugcacccagacccugagccg

SEQ ID NO: 33143 - RNA, 20 nt, Artificial Sequence
  GATA2 Guide RNA
ugcagacggcaacggcccug

SEQ ID NO: 33144 - RNA, 20 nt, Artificial Sequence
  GATA2 Guide RNA
ugccgccagcgccugacacc

SEQ ID NO: 33145 - RNA, 20 nt, Artificial Sequence
  GATA2 Guide RNA
ugccgucugcacccagaccc

SEQ ID NO: 33146 - RNA, 20 nt, Artificial Sequence
  GATA2 Guide RNA
ugcgcgaggaagggggagug

SEQ ID NO: 33147 - RNA, 20 nt, Artificial Sequence
  GATA2 Guide RNA
ugcgggacaccucguggugg

SEQ ID NO: 33148 - RNA, 20 nt, Artificial Sequence
  GATA2 Guide RNA
ugcguggcugaacccccucc

SEQ ID NO: 33149 - RNA, 20 nt, Artificial Sequence
  GATA2 Guide RNA
ugcucuuucucgccggaucu

SEQ ID NO: 33150 - RNA, 20 nt, Artificial Sequence
  GATA2 Guide RNA
uggagccgcgggucaccacg

SEQ ID NO: 33151 - RNA, 20 nt, Artificial Sequence
  GATA2 Guide RNA
uggcggcacgccucacuccc

SEQ ID NO: 33152 - RNA, 20 nt, Artificial Sequence
  GATA2 Guide RNA
uggcgugcgggacaccucgu

SEQ ID NO: 33153 - RNA, 20 nt, Artificial Sequence
  GATA2 Guide RNA
uggcugaacccccucccccg

SEQ ID NO: 33154 - RNA, 20 nt, Artificial Sequence
  GATA2 Guide RNA
ugggacuuugggggguguca

SEQ ID NO: 33155 - RNA, 20 nt, Artificial Sequence
  GATA2 Guide RNA
ugggaggaaagcccaaggcu

SEQ ID NO: 33156 - RNA, 20 nt, Artificial Sequence
  GATA2 Guide RNA
ugggcuggggcuccguggcg

SEQ ID NO: 33157 - RNA, 20 nt, Artificial Sequence
  GATA2 Guide RNA
ugggcuuuccucccacccgg

SEQ ID NO: 33158 - RNA, 20 nt, Artificial Sequence
  GATA2 Guide RNA
uggggcuccguggcgugcgg

SEQ ID NO: 33159 - RNA, 20 nt, Artificial Sequence
  GATA2 Guide RNA
uggggggugucaggcgcugg

SEQ ID NO: 33160 - RNA, 20 nt, Artificial Sequence
  GATA2 Guide RNA
ugggugcagacggcaacggc

SEQ ID NO: 33161 - RNA, 20 nt, Artificial Sequence
  GATA2 Guide RNA
uggugacccgcggcuccaga

SEQ ID NO: 33162 - RNA, 20 nt, Artificial Sequence
  GATA2 Guide RNA
uggugcucuuucucgccgga

SEQ ID NO: 33163 - RNA, 20 nt, Artificial Sequence
  GATA2 Guide RNA
uggugggacuuuggggggug

SEQ ID NO: 33164 - RNA, 20 nt, Artificial Sequence
  GATA2 Guide RNA
ugucaggcgcuggcggcacg

SEQ ID NO: 33165 - RNA, 20 nt, Artificial Sequence
  GATA2 Guide RNA
ugucccgcacgccacggagc

SEQ ID NO: 33166 - RNA, 20 nt, Artificial Sequence
  GATA2 Guide RNA
ugugauucuggagccgcggg

SEQ ID NO: 33167 - RNA, 20 nt, Artificial Sequence
  GATA2 Guide RNA
ugugcguggcugaacccccu

SEQ ID NO: 33168 - RNA, 20 nt, Artificial Sequence
  GATA2 Guide RNA
ugugugauucuggagccgcg

SEQ ID NO: 33169 - RNA, 20 nt, Artificial Sequence
  GATA2 Guide RNA
uucagccacgcacacucacg

SEQ ID NO: 33170 - RNA, 20 nt, Artificial Sequence
  GATA2 Guide RNA
uuccucccacccgggacugg

SEQ ID NO: 33171 - RNA, 20 nt, Artificial Sequence
  GATA2 Guide RNA
uuccucgcgcagggccguug

SEQ ID NO: 33172 - RNA, 20 nt, Artificial Sequence
  GATA2 Guide RNA
uuccuuucguuuugagccuu

SEQ ID NO: 33173 - RNA, 20 nt, Artificial Sequence
  GATA2 Guide RNA
uucguuuugagccuugggcu

SEQ ID NO: 33174 - RNA, 20 nt, Artificial Sequence
  GATA2 Guide RNA
uucucgccggaucugggcug

SEQ ID NO: 33175 - RNA, 20 nt, Artificial Sequence
  GATA2 Guide RNA
uucuggagccgcgggucacc

SEQ ID NO: 33176 - RNA, 20 nt, Artificial Sequence
  GATA2 Guide RNA
uugagccuugggcuuuccuc

SEQ ID NO: 33177 - RNA, 20 nt, Artificial Sequence
  GATA2 Guide RNA
uugccgucugcacccagacc

SEQ ID NO: 33178 - RNA, 20 nt, Artificial Sequence
  GATA2 Guide RNA
uugggcuuuccucccacccg

SEQ ID NO: 33179 - RNA, 20 nt, Artificial Sequence
  GATA2 Guide RNA
uuggggggugucaggcgcug

SEQ ID NO: 33180 - RNA, 20 nt, Artificial Sequence
  GATA2 Guide RNA
uuuccucccacccgggacug

SEQ ID NO: 33181 - RNA, 20 nt, Artificial Sequence
  GATA2 Guide RNA
uuucguuuugagccuugggc

SEQ ID NO: 33182 - RNA, 20 nt, Artificial Sequence
  GATA2 Guide RNA
uuucucgccggaucugggcu

SEQ ID NO: 33183 - RNA, 20 nt, Artificial Sequence
  GATA2 Guide RNA
uuugagccuugggcuuuccu

SEQ ID NO: 33184 - RNA, 20 nt, Artificial Sequence
  GATA2 Guide RNA
uuuggggggugucaggcgcu

SEQ ID NO: 33185 - RNA, 20 nt, Artificial Sequence
  GATA2 Guide RNA
uuuugagccuugggcuuucc

SEQ ID NO: 33186 - RNA, 21 nt, Artificial Sequence
  GATA2 Guide RNA
aaaacgaaaggaaggcggggg

SEQ ID NO: 33187 - RNA, 21 nt, Artificial Sequence
  GATA2 Guide RNA
aaacgaaaggaaggcggggga

SEQ ID NO: 33188 - RNA, 21 nt, Artificial Sequence
  GATA2 Guide RNA
aaagagcaccagucccgggug

SEQ ID NO: 33189 - RNA, 21 nt, Artificial Sequence
  GATA2 Guide RNA
aaagcccaaggcucaaaacga

SEQ ID NO: 33190 - RNA, 21 nt, Artificial Sequence
  GATA2 Guide RNA
aaaggaaggcgggggaggggg

SEQ ID NO: 33191 - RNA, 21 nt, Artificial Sequence
  GATA2 Guide RNA
aaagucccaccacgagguguc

SEQ ID NO: 33192 - RNA, 21 nt, Artificial Sequence
  GATA2 Guide RNA
aacccccucccccgccuuccu

SEQ ID NO: 33193 - RNA, 21 nt, Artificial Sequence
  GATA2 Guide RNA
aacgaaaggaaggcgggggag

SEQ ID NO: 33194 - RNA, 21 nt, Artificial Sequence
  GATA2 Guide RNA
aacggcccugcgcgaggaagg

SEQ ID NO: 33195 - RNA, 21 nt, Artificial Sequence
  GATA2 Guide RNA
aagagcaccagucccgggugg

SEQ ID NO: 33196 - RNA, 21 nt, Artificial Sequence
  GATA2 Guide RNA
aagcccaaggcucaaaacgaa

SEQ ID NO: 33197 - RNA, 21 nt, Artificial Sequence
  GATA2 Guide RNA
aaggaaggcgggggagggggu

SEQ ID NO: 33198 - RNA, 21 nt, Artificial Sequence
  GATA2 Guide RNA
aaggcgggggaggggguucag

SEQ ID NO: 33199 - RNA, 21 nt, Artificial Sequence
  GATA2 Guide RNA
aaggcucaaaacgaaaggaag

SEQ ID NO: 33200 - RNA, 21 nt, Artificial Sequence
  GATA2 Guide RNA
aagggggagugaggcgugccg

SEQ ID NO: 33201 - RNA, 21 nt, Artificial Sequence
  GATA2 Guide RNA
aagucccaccacgaggugucc

SEQ ID NO: 33202 - RNA, 21 nt, Artificial Sequence
  GATA2 Guide RNA
acaccccccaaagucccacca

SEQ ID NO: 33203 - RNA, 21 nt, Artificial Sequence
  GATA2 Guide RNA
acaccucguggugggacuuug

SEQ ID NO: 33204 - RNA, 21 nt, Artificial Sequence
  GATA2 Guide RNA
acacucacguggugacccgcg

SEQ ID NO: 33205 - RNA, 21 nt, Artificial Sequence
  GATA2 Guide RNA
accacgaggugucccgcacgc

SEQ ID NO: 33206 - RNA, 21 nt, Artificial Sequence
  GATA2 Guide RNA
accacgugagugugcguggcu

SEQ ID NO: 33207 - RNA, 21 nt, Artificial Sequence
  GATA2 Guide RNA
accagucccgggugggaggaa

SEQ ID NO: 33208 - RNA, 21 nt, Artificial Sequence
  GATA2 Guide RNA
accccccaaagucccaccacg

SEQ ID NO: 33209 - RNA, 21 nt, Artificial Sequence
  GATA2 Guide RNA
acccccucccccgccuuccuu

SEQ ID NO: 33210 - RNA, 21 nt, Artificial Sequence
  GATA2 Guide RNA
acccgcggcuccagaaucaca

SEQ ID NO: 33211 - RNA, 21 nt, Artificial Sequence
  GATA2 Guide RNA
acccgggacuggugcucuuuc

SEQ ID NO: 33212 - RNA, 21 nt, Artificial Sequence
  GATA2 Guide RNA
accucguggugggacuuuggg

SEQ ID NO: 33213 - RNA, 21 nt, Artificial Sequence
  GATA2 Guide RNA
acgaaaggaaggcgggggagg

SEQ ID NO: 33214 - RNA, 21 nt, Artificial Sequence
  GATA2 Guide RNA
acgaggugucccgcacgccac

SEQ ID NO: 33215 - RNA, 21 nt, Artificial Sequence
  GATA2 Guide RNA
acgcacacucacguggugacc

SEQ ID NO: 33216 - RNA, 21 nt, Artificial Sequence
  GATA2 Guide RNA
acgccacggagccccagccca

SEQ ID NO: 33217 - RNA, 21 nt, Artificial Sequence
  GATA2 Guide RNA
acgccucacucccccuuccuc

SEQ ID NO: 33218 - RNA, 21 nt, Artificial Sequence
  GATA2 Guide RNA
acggagccccagcccagaucc

SEQ ID NO: 33219 - RNA, 21 nt, Artificial Sequence
  GATA2 Guide RNA
acggcaacggcccugcgcgag

SEQ ID NO: 33220 - RNA, 21 nt, Artificial Sequence
  GATA2 Guide RNA
acggcccugcgcgaggaaggg

SEQ ID NO: 33221 - RNA, 21 nt, Artificial Sequence
  GATA2 Guide RNA
acgugagugugcguggcugaa

SEQ ID NO: 33222 - RNA, 21 nt, Artificial Sequence
  GATA2 Guide RNA
acguggugacccgcggcucca

SEQ ID NO: 33223 - RNA, 21 nt, Artificial Sequence
  GATA2 Guide RNA
acucacguggugacccgcggc

SEQ ID NO: 33224 - RNA, 21 nt, Artificial Sequence
  GATA2 Guide RNA
acuggugcucuuucucgccgg

SEQ ID NO: 33225 - RNA, 21 nt, Artificial Sequence
  GATA2 Guide RNA
acuuuggggggugucaggcgc

SEQ ID NO: 33226 - RNA, 21 nt, Artificial Sequence
  GATA2 Guide RNA
agaaagagcaccagucccggg

SEQ ID NO: 33227 - RNA, 21 nt, Artificial Sequence
  GATA2 Guide RNA
agacggcaacggcccugcgcg

SEQ ID NO: 33228 - RNA, 21 nt, Artificial Sequence
  GATA2 Guide RNA
agagcaccagucccggguggg

SEQ ID NO: 33229 - RNA, 21 nt, Artificial Sequence
  GATA2 Guide RNA
agauccggcgagaaagagcac

SEQ ID NO: 33230 - RNA, 21 nt, Artificial Sequence
  GATA2 Guide RNA
agcaccagucccgggugggag

SEQ ID NO: 33231 - RNA, 21 nt, Artificial Sequence
  GATA2 Guide RNA
agccacgcacacucacguggu

SEQ ID NO: 33232 - RNA, 21 nt, Artificial Sequence
  GATA2 Guide RNA
agcccaaggcucaaaacgaaa

SEQ ID NO: 33233 - RNA, 21 nt, Artificial Sequence
  GATA2 Guide RNA
agcccagauccggcgagaaag

SEQ ID NO: 33234 - RNA, 21 nt, Artificial Sequence
  GATA2 Guide RNA
agccccagcccagauccggcg

SEQ ID NO: 33235 - RNA, 21 nt, Artificial Sequence
  GATA2 Guide RNA
agccgcgggucaccacgugag

SEQ ID NO: 33236 - RNA, 21 nt, Artificial Sequence
  GATA2 Guide RNA
agccuugggcuuuccucccac

SEQ ID NO: 33237 - RNA, 21 nt, Artificial Sequence
  GATA2 Guide RNA
agcgccugacaccccccaaag

SEQ ID NO: 33238 - RNA, 21 nt, Artificial Sequence
  GATA2 Guide RNA
aggaaagcccaaggcucaaaa

SEQ ID NO: 33239 - RNA, 21 nt, Artificial Sequence
  GATA2 Guide RNA
aggaaggcgggggaggggguu

SEQ ID NO: 33240 - RNA, 21 nt, Artificial Sequence
  GATA2 Guide RNA
aggaagggggagugaggcgug

SEQ ID NO: 33241 - RNA, 21 nt, Artificial Sequence
  GATA2 Guide RNA
aggcgcuggcggcacgccuca

SEQ ID NO: 33242 - RNA, 21 nt, Artificial Sequence
  GATA2 Guide RNA
aggcgggggaggggguucagc

SEQ ID NO: 33243 - RNA, 21 nt, Artificial Sequence
  GATA2 Guide RNA
aggcgugccgccagcgccuga

SEQ ID NO: 33244 - RNA, 21 nt, Artificial Sequence
  GATA2 Guide RNA
aggcucaaaacgaaaggaagg

SEQ ID NO: 33245 - RNA, 21 nt, Artificial Sequence
  GATA2 Guide RNA
agggccguugccgucugcacc

SEQ ID NO: 33246 - RNA, 21 nt, Artificial Sequence
  GATA2 Guide RNA
agggggagugaggcgugccgc

SEQ ID NO: 33247 - RNA, 21 nt, Artificial Sequence
  GATA2 Guide RNA
aggggguucagccacgcacac

SEQ ID NO: 33248 - RNA, 21 nt, Artificial Sequence
  GATA2 Guide RNA
aggugucccgcacgccacgga

SEQ ID NO: 33249 - RNA, 21 nt, Artificial Sequence
  GATA2 Guide RNA
agucccaccacgagguguccc

SEQ ID NO: 33250 - RNA, 21 nt, Artificial Sequence
  GATA2 Guide RNA
agucccgggugggaggaaagc

SEQ ID NO: 33251 - RNA, 21 nt, Artificial Sequence
  GATA2 Guide RNA
agugaggcgugccgccagcgc

SEQ ID NO: 33252 - RNA, 21 nt, Artificial Sequence
  GATA2 Guide RNA
agugugcguggcugaaccccc

SEQ ID NO: 33253 - RNA, 21 nt, Artificial Sequence
  GATA2 Guide RNA
auccggcgagaaagagcacca

SEQ ID NO: 33254 - RNA, 21 nt, Artificial Sequence
  GATA2 Guide RNA
aucugggcuggggcuccgugg

SEQ ID NO: 33255 - RNA, 21 nt, Artificial Sequence
  GATA2 Guide RNA
auucuggagccgcgggucacc

SEQ ID NO: 33256 - RNA, 21 nt, Artificial Sequence
  GATA2 Guide RNA
caaaacgaaaggaaggcgggg

SEQ ID NO: 33257 - RNA, 21 nt, Artificial Sequence
  GATA2 Guide RNA
caaagucccaccacgaggugu

SEQ ID NO: 33258 - RNA, 21 nt, Artificial Sequence
  GATA2 Guide RNA
caacggcccugcgcgaggaag

SEQ ID NO: 33259 - RNA, 21 nt, Artificial Sequence
  GATA2 Guide RNA
caaggcucaaaacgaaaggaa

SEQ ID NO: 33260 - RNA, 21 nt, Artificial Sequence
  GATA2 Guide RNA
cacacucacguggugacccgc

SEQ ID NO: 33261 - RNA, 21 nt, Artificial Sequence
  GATA2 Guide RNA
caccacgaggugucccgcacg

SEQ ID NO: 33262 - RNA, 21 nt, Artificial Sequence
  GATA2 Guide RNA
caccacgugagugugcguggc

SEQ ID NO: 33263 - RNA, 21 nt, Artificial Sequence
  GATA2 Guide RNA
caccagucccgggugggagga

SEQ ID NO: 33264 - RNA, 21 nt, Artificial Sequence
  GATA2 Guide RNA
cacccagacccugagccgccg

SEQ ID NO: 33265 - RNA, 21 nt, Artificial Sequence
  GATA2 Guide RNA
caccccccaaagucccaccac

SEQ ID NO: 33266 - RNA, 21 nt, Artificial Sequence
  GATA2 Guide RNA
cacccgggacuggugcucuuu

SEQ ID NO: 33267 - RNA, 21 nt, Artificial Sequence
  GATA2 Guide RNA
caccucguggugggacuuugg

SEQ ID NO: 33268 - RNA, 21 nt, Artificial Sequence
  GATA2 Guide RNA
cacgaggugucccgcacgcca

SEQ ID NO: 33269 - RNA, 21 nt, Artificial Sequence
  GATA2 Guide RNA
cacgcacacucacguggugac

SEQ ID NO: 33270 - RNA, 21 nt, Artificial Sequence
  GATA2 Guide RNA
cacgccucacucccccuuccu

SEQ ID NO: 33271 - RNA, 21 nt, Artificial Sequence
  GATA2 Guide RNA
cacggagccccagcccagauc

SEQ ID NO: 33272 - RNA, 21 nt, Artificial Sequence
  GATA2 Guide RNA
cacgugagugugcguggcuga

SEQ ID NO: 33273 - RNA, 21 nt, Artificial Sequence
  GATA2 Guide RNA
cacguggugacccgcggcucc

SEQ ID NO: 33274 - RNA, 21 nt, Artificial Sequence
  GATA2 Guide RNA
cacucacguggugacccgcgg

SEQ ID NO: 33275 - RNA, 21 nt, Artificial Sequence
  GATA2 Guide RNA
cagacggcaacggcccugcgc

SEQ ID NO: 33276 - RNA, 21 nt, Artificial Sequence
  GATA2 Guide RNA
cagauccggcgagaaagagca

SEQ ID NO: 33277 - RNA, 21 nt, Artificial Sequence
  GATA2 Guide RNA
cagccacgcacacucacgugg

SEQ ID NO: 33278 - RNA, 21 nt, Artificial Sequence
  GATA2 Guide RNA
cagcccagauccggcgagaaa

SEQ ID NO: 33279 - RNA, 21 nt, Artificial Sequence
  GATA2 Guide RNA
cagcgccugacaccccccaaa

SEQ ID NO: 33280 - RNA, 21 nt, Artificial Sequence
  GATA2 Guide RNA
cagggccguugccgucugcac

SEQ ID NO: 33281 - RNA, 21 nt, Artificial Sequence
  GATA2 Guide RNA
cagggucugggugcagacggc

SEQ ID NO: 33282 - RNA, 21 nt, Artificial Sequence
  GATA2 Guide RNA
cagucccgggugggaggaaag

SEQ ID NO: 33283 - RNA, 21 nt, Artificial Sequence
  GATA2 Guide RNA
ccaaagucccaccacgaggug

SEQ ID NO: 33284 - RNA, 21 nt, Artificial Sequence
  GATA2 Guide RNA
ccaaggcucaaaacgaaagga

SEQ ID NO: 33285 - RNA, 21 nt, Artificial Sequence
  GATA2 Guide RNA
ccaccacgaggugucccgcac

SEQ ID NO: 33286 - RNA, 21 nt, Artificial Sequence
  GATA2 Guide RNA
ccacccgggacuggugcucuu

SEQ ID NO: 33287 - RNA, 21 nt, Artificial Sequence
  GATA2 Guide RNA
ccacgaggugucccgcacgcc

SEQ ID NO: 33288 - RNA, 21 nt, Artificial Sequence
  GATA2 Guide RNA
ccacgcacacucacgugguga

SEQ ID NO: 33289 - RNA, 21 nt, Artificial Sequence
  GATA2 Guide RNA
ccacggagccccagcccagau

SEQ ID NO: 33290 - RNA, 21 nt, Artificial Sequence
  GATA2 Guide RNA
ccacgugagugugcguggcug

SEQ ID NO: 33291 - RNA, 21 nt, Artificial Sequence
  GATA2 Guide RNA
ccagauccggcgagaaagagc

SEQ ID NO: 33292 - RNA, 21 nt, Artificial Sequence
  GATA2 Guide RNA
ccagcccagauccggcgagaa

SEQ ID NO: 33293 - RNA, 21 nt, Artificial Sequence
  GATA2 Guide RNA
ccagcgccugacaccccccaa

SEQ ID NO: 33294 - RNA, 21 nt, Artificial Sequence
  GATA2 Guide RNA
ccagucccgggugggaggaaa

SEQ ID NO: 33295 - RNA, 21 nt, Artificial Sequence
  GATA2 Guide RNA
cccaaagucccaccacgaggu

SEQ ID NO: 33296 - RNA, 21 nt, Artificial Sequence
  GATA2 Guide RNA
cccaaggcucaaaacgaaagg

SEQ ID NO: 33297 - RNA, 21 nt, Artificial Sequence
  GATA2 Guide RNA
cccaccacgaggugucccgca

SEQ ID NO: 33298 - RNA, 21 nt, Artificial Sequence
  GATA2 Guide RNA
cccacccgggacuggugcucu

SEQ ID NO: 33299 - RNA, 21 nt, Artificial Sequence
  GATA2 Guide RNA
cccagauccggcgagaaagag

SEQ ID NO: 33300 - RNA, 21 nt, Artificial Sequence
  GATA2 Guide RNA
cccagcccagauccggcgaga

SEQ ID NO: 33301 - RNA, 21 nt, Artificial Sequence
  GATA2 Guide RNA
ccccaaagucccaccacgagg

SEQ ID NO: 33302 - RNA, 21 nt, Artificial Sequence
  GATA2 Guide RNA
ccccagcccagauccggcgag

SEQ ID NO: 33303 - RNA, 21 nt, Artificial Sequence
  GATA2 Guide RNA
cccccaaagucccaccacgag

SEQ ID NO: 33304 - RNA, 21 nt, Artificial Sequence
  GATA2 Guide RNA
ccccccaaagucccaccacga

SEQ ID NO: 33305 - RNA, 21 nt, Artificial Sequence
  GATA2 Guide RNA
cccccgccuuccuuucguuuu

SEQ ID NO: 33306 - RNA, 21 nt, Artificial Sequence
  GATA2 Guide RNA
cccccucccccgccuuccuuu

SEQ ID NO: 33307 - RNA, 21 nt, Artificial Sequence
  GATA2 Guide RNA
ccccgccuuccuuucguuuug

SEQ ID NO: 33308 - RNA, 21 nt, Artificial Sequence
  GATA2 Guide RNA
ccccucccccgccuuccuuuc

SEQ ID NO: 33309 - RNA, 21 nt, Artificial Sequence
  GATA2 Guide RNA
cccgccuuccuuucguuuuga

SEQ ID NO: 33310 - RNA, 21 nt, Artificial Sequence
  GATA2 Guide RNA
cccgggacuggugcucuuucu

SEQ ID NO: 33311 - RNA, 21 nt, Artificial Sequence
  GATA2 Guide RNA
cccgggugggaggaaagccca

SEQ ID NO: 33312 - RNA, 21 nt, Artificial Sequence
  GATA2 Guide RNA
cccucccccgccuuccuuucg

SEQ ID NO: 33313 - RNA, 21 nt, Artificial Sequence
  GATA2 Guide RNA
cccugcgcgaggaagggggag

SEQ ID NO: 33314 - RNA, 21 nt, Artificial Sequence
  GATA2 Guide RNA
cccuuccucgcgcagggccgu

SEQ ID NO: 33315 - RNA, 21 nt, Artificial Sequence
  GATA2 Guide RNA
ccgccuuccuuucguuuugag

SEQ ID NO: 33316 - RNA, 21 nt, Artificial Sequence
  GATA2 Guide RNA
ccgcgggucaccacgugagug

SEQ ID NO: 33317 - RNA, 21 nt, Artificial Sequence
  GATA2 Guide RNA
ccggaucugggcuggggcucc

SEQ ID NO: 33318 - RNA, 21 nt, Artificial Sequence
  GATA2 Guide RNA
ccggcgagaaagagcaccagu

SEQ ID NO: 33319 - RNA, 21 nt, Artificial Sequence
  GATA2 Guide RNA
ccgggacuggugcucuuucuc

SEQ ID NO: 33320 - RNA, 21 nt, Artificial Sequence
  GATA2 Guide RNA
ccgggugggaggaaagcccaa

SEQ ID NO: 33321 - RNA, 21 nt, Artificial Sequence
  GATA2 Guide RNA
ccgucugcacccagacccuga

SEQ ID NO: 33322 - RNA, 21 nt, Artificial Sequence
  GATA2 Guide RNA
ccguggcgugcgggacaccuc

SEQ ID NO: 33323 - RNA, 21 nt, Artificial Sequence
  GATA2 Guide RNA
ccguugccgucugcacccaga

SEQ ID NO: 33324 - RNA, 21 nt, Artificial Sequence
  GATA2 Guide RNA
ccucacucccccuuccucgcg

SEQ ID NO: 33325 - RNA, 21 nt, Artificial Sequence
  GATA2 Guide RNA
ccucccacccgggacuggugc

SEQ ID NO: 33326 - RNA, 21 nt, Artificial Sequence
  GATA2 Guide RNA
ccucccccgccuuccuuucgu

SEQ ID NO: 33327 - RNA, 21 nt, Artificial Sequence
  GATA2 Guide RNA
ccucguggugggacuuugggg

SEQ ID NO: 33328 - RNA, 21 nt, Artificial Sequence
  GATA2 Guide RNA
ccugacaccccccaaaguccc

SEQ ID NO: 33329 - RNA, 21 nt, Artificial Sequence
  GATA2 Guide RNA
ccugcgcgaggaagggggagu

SEQ ID NO: 33330 - RNA, 21 nt, Artificial Sequence
  GATA2 Guide RNA
ccuuccucgcgcagggccguu

SEQ ID NO: 33331 - RNA, 21 nt, Artificial Sequence
  GATA2 Guide RNA
ccuuccuuucguuuugagccu

SEQ ID NO: 33332 - RNA, 21 nt, Artificial Sequence
  GATA2 Guide RNA
ccuugggcuuuccucccaccc

SEQ ID NO: 33333 - RNA, 21 nt, Artificial Sequence
  GATA2 Guide RNA
ccuuucguuuugagccuuggg

SEQ ID NO: 33334 - RNA, 21 nt, Artificial Sequence
  GATA2 Guide RNA
cgaaaggaaggcgggggaggg

SEQ ID NO: 33335 - RNA, 21 nt, Artificial Sequence
  GATA2 Guide RNA
cgagaaagagcaccagucccg

SEQ ID NO: 33336 - RNA, 21 nt, Artificial Sequence
  GATA2 Guide RNA
cgaggaagggggagugaggcg

SEQ ID NO: 33337 - RNA, 21 nt, Artificial Sequence
  GATA2 Guide RNA
cgaggugucccgcacgccacg

SEQ ID NO: 33338 - RNA, 21 nt, Artificial Sequence
  GATA2 Guide RNA
cgcacacucacguggugaccc

SEQ ID NO: 33339 - RNA, 21 nt, Artificial Sequence
  GATA2 Guide RNA
cgcagggccguugccgucugc

SEQ ID NO: 33340 - RNA, 21 nt, Artificial Sequence
  GATA2 Guide RNA
cgccggaucugggcuggggcu

SEQ ID NO: 33341 - RNA, 21 nt, Artificial Sequence
  GATA2 Guide RNA
cgccucacucccccuuccucg

SEQ ID NO: 33342 - RNA, 21 nt, Artificial Sequence
  GATA2 Guide RNA
cgccugacaccccccaaaguc

SEQ ID NO: 33343 - RNA, 21 nt, Artificial Sequence
  GATA2 Guide RNA
cgccuuccuuucguuuugagc

SEQ ID NO: 33344 - RNA, 21 nt, Artificial Sequence
  GATA2 Guide RNA
cgcgaggaagggggagugagg

SEQ ID NO: 33345 - RNA, 21 nt, Artificial Sequence
  GATA2 Guide RNA
cgcgcagggccguugccgucu

SEQ ID NO: 33346 - RNA, 21 nt, Artificial Sequence
  GATA2 Guide RNA
cgcgggucaccacgugagugu

SEQ ID NO: 33347 - RNA, 21 nt, Artificial Sequence
  GATA2 Guide RNA
cgcuggcggcacgccucacuc

SEQ ID NO: 33348 - RNA, 21 nt, Artificial Sequence
  GATA2 Guide RNA
cggagccccagcccagauccg

SEQ ID NO: 33349 - RNA, 21 nt, Artificial Sequence
  GATA2 Guide RNA
cggaucugggcuggggcuccg

SEQ ID NO: 33350 - RNA, 21 nt, Artificial Sequence
  GATA2 Guide RNA
cggcacgccucacucccccuu

SEQ ID NO: 33351 - RNA, 21 nt, Artificial Sequence
  GATA2 Guide RNA
cggcgagaaagagcaccaguc

SEQ ID NO: 33352 - RNA, 21 nt, Artificial Sequence
  GATA2 Guide RNA
cggcggcucagggucugggug

SEQ ID NO: 33353 - RNA, 21 nt, Artificial Sequence
  GATA2 Guide RNA
cggcucagggucugggugcag

SEQ ID NO: 33354 - RNA, 21 nt, Artificial Sequence
  GATA2 Guide RNA
cgggacaccucguggugggac

SEQ ID NO: 33355 - RNA, 21 nt, Artificial Sequence
  GATA2 Guide RNA
cgggacuggugcucuuucucg

SEQ ID NO: 33356 - RNA, 21 nt, Artificial Sequence
  GATA2 Guide RNA
cgggggaggggguucagccac

SEQ ID NO: 33357 - RNA, 21 nt, Artificial Sequence
  GATA2 Guide RNA
cgggucaccacgugagugugc

SEQ ID NO: 33358 - RNA, 21 nt, Artificial Sequence
  GATA2 Guide RNA
cgggugggaggaaagcccaag

SEQ ID NO: 33359 - RNA, 21 nt, Artificial Sequence
  GATA2 Guide RNA
cgucugcacccagacccugag

SEQ ID NO: 33360 - RNA, 21 nt, Artificial Sequence
  GATA2 Guide RNA
cgugagugugcguggcugaac

SEQ ID NO: 33361 - RNA, 21 nt, Artificial Sequence
  GATA2 Guide RNA
cgugccgccagcgccugacac

SEQ ID NO: 33362 - RNA, 21 nt, Artificial Sequence
  GATA2 Guide RNA
cgugcgggacaccucguggug

SEQ ID NO: 33363 - RNA, 21 nt, Artificial Sequence
  GATA2 Guide RNA
cguggcgugcgggacaccucg

SEQ ID NO: 33364 - RNA, 21 nt, Artificial Sequence
  GATA2 Guide RNA
cguggcugaacccccuccccc

SEQ ID NO: 33365 - RNA, 21 nt, Artificial Sequence
  GATA2 Guide RNA
cguggugacccgcggcuccag

SEQ ID NO: 33366 - RNA, 21 nt, Artificial Sequence
  GATA2 Guide RNA
cguggugggacuuuggggggu

SEQ ID NO: 33367 - RNA, 21 nt, Artificial Sequence
  GATA2 Guide RNA
cguugccgucugcacccagac

SEQ ID NO: 33368 - RNA, 21 nt, Artificial Sequence
  GATA2 Guide RNA
cguuuugagccuugggcuuuc

SEQ ID NO: 33369 - RNA, 21 nt, Artificial Sequence
  GATA2 Guide RNA
cucaaaacgaaaggaaggcgg

SEQ ID NO: 33370 - RNA, 21 nt, Artificial Sequence
  GATA2 Guide RNA
cucacguggugacccgcggcu

SEQ ID NO: 33371 - RNA, 21 nt, Artificial Sequence
  GATA2 Guide RNA
cucacucccccuuccucgcgc

SEQ ID NO: 33372 - RNA, 21 nt, Artificial Sequence
  GATA2 Guide RNA
cucagggucugggugcagacg

SEQ ID NO: 33373 - RNA, 21 nt, Artificial Sequence
  GATA2 Guide RNA
cucccacccgggacuggugcu

SEQ ID NO: 33374 - RNA, 21 nt, Artificial Sequence
  GATA2 Guide RNA
cucccccgccuuccuuucguu

SEQ ID NO: 33375 - RNA, 21 nt, Artificial Sequence
  GATA2 Guide RNA
cuccguggcgugcgggacacc

SEQ ID NO: 33376 - RNA, 21 nt, Artificial Sequence
  GATA2 Guide RNA
cucgccggaucugggcugggg

SEQ ID NO: 33377 - RNA, 21 nt, Artificial Sequence
  GATA2 Guide RNA
cucgcgcagggccguugccgu

SEQ ID NO: 33378 - RNA, 21 nt, Artificial Sequence
  GATA2 Guide RNA
cucguggugggacuuuggggg

SEQ ID NO: 33379 - RNA, 21 nt, Artificial Sequence
  GATA2 Guide RNA
cucuuucucgccggaucuggg

SEQ ID NO: 33380 - RNA, 21 nt, Artificial Sequence
  GATA2 Guide RNA
cugaacccccucccccgccuu

SEQ ID NO: 33381 - RNA, 21 nt, Artificial Sequence
  GATA2 Guide RNA
cugacaccccccaaaguccca

SEQ ID NO: 33382 - RNA, 21 nt, Artificial Sequence
  GATA2 Guide RNA
cugcacccagacccugagccg

SEQ ID NO: 33383 - RNA, 21 nt, Artificial Sequence
  GATA2 Guide RNA
cugcgcgaggaagggggagug

SEQ ID NO: 33384 - RNA, 21 nt, Artificial Sequence
  GATA2 Guide RNA
cuggagccgcgggucaccacg

SEQ ID NO: 33385 - RNA, 21 nt, Artificial Sequence
  GATA2 Guide RNA
cuggcggcacgccucacuccc

SEQ ID NO: 33386 - RNA, 21 nt, Artificial Sequence
  GATA2 Guide RNA
cugggugcagacggcaacggc

SEQ ID NO: 33387 - RNA, 21 nt, Artificial Sequence
  GATA2 Guide RNA
cuggugcucuuucucgccgga

SEQ ID NO: 33388 - RNA, 21 nt, Artificial Sequence
  GATA2 Guide RNA
cuuccucgcgcagggccguug

SEQ ID NO: 33389 - RNA, 21 nt, Artificial Sequence
  GATA2 Guide RNA
cuuccuuucguuuugagccuu

SEQ ID NO: 33390 - RNA, 21 nt, Artificial Sequence
  GATA2 Guide RNA
cuugggcuuuccucccacccg

SEQ ID NO: 33391 - RNA, 21 nt, Artificial Sequence
  GATA2 Guide RNA
cuuuccucccacccgggacug

SEQ ID NO: 33392 - RNA, 21 nt, Artificial Sequence
  GATA2 Guide RNA
cuuucguuuugagccuugggc

SEQ ID NO: 33393 - RNA, 21 nt, Artificial Sequence
  GATA2 Guide RNA
cuuucucgccggaucugggcu

SEQ ID NO: 33394 - RNA, 21 nt, Artificial Sequence
  GATA2 Guide RNA
cuuuggggggugucaggcgcu

SEQ ID NO: 33395 - RNA, 21 nt, Artificial Sequence
  GATA2 Guide RNA
gaaagagcaccagucccgggu

SEQ ID NO: 33396 - RNA, 21 nt, Artificial Sequence
  GATA2 Guide RNA
gaaagcccaaggcucaaaacg

SEQ ID NO: 33397 - RNA, 21 nt, Artificial Sequence
  GATA2 Guide RNA
gaaaggaaggcgggggagggg

SEQ ID NO: 33398 - RNA, 21 nt, Artificial Sequence
  GATA2 Guide RNA
gaacccccucccccgccuucc

SEQ ID NO: 33399 - RNA, 21 nt, Artificial Sequence
  GATA2 Guide RNA
gaaggcgggggaggggguuca

SEQ ID NO: 33400 - RNA, 21 nt, Artificial Sequence
  GATA2 Guide RNA
gaagggggagugaggcgugcc

SEQ ID NO: 33401 - RNA, 21 nt, Artificial Sequence
  GATA2 Guide RNA
gacaccccccaaagucccacc

SEQ ID NO: 33402 - RNA, 21 nt, Artificial Sequence
  GATA2 Guide RNA
gacaccucguggugggacuuu

SEQ ID NO: 33403 - RNA, 21 nt, Artificial Sequence
  GATA2 Guide RNA
gacccgcggcuccagaaucac

SEQ ID NO: 33404 - RNA, 21 nt, Artificial Sequence
  GATA2 Guide RNA
gacggcaacggcccugcgcga

SEQ ID NO: 33405 - RNA, 21 nt, Artificial Sequence
  GATA2 Guide RNA
gacuggugcucuuucucgccg

SEQ ID NO: 33406 - RNA, 21 nt, Artificial Sequence
  GATA2 Guide RNA
gacuuuggggggugucaggcg

SEQ ID NO: 33407 - RNA, 21 nt, Artificial Sequence
  GATA2 Guide RNA
gagaaagagcaccagucccgg

SEQ ID NO: 33408 - RNA, 21 nt, Artificial Sequence
  GATA2 Guide RNA
gagcaccagucccggguggga

SEQ ID NO: 33409 - RNA, 21 nt, Artificial Sequence
  GATA2 Guide RNA
gagccccagcccagauccggc

SEQ ID NO: 33410 - RNA, 21 nt, Artificial Sequence
  GATA2 Guide RNA
gagccgcgggucaccacguga

SEQ ID NO: 33411 - RNA, 21 nt, Artificial Sequence
  GATA2 Guide RNA
gagccuugggcuuuccuccca

SEQ ID NO: 33412 - RNA, 21 nt, Artificial Sequence
  GATA2 Guide RNA
gaggaaagcccaaggcucaaa

SEQ ID NO: 33413 - RNA, 21 nt, Artificial Sequence
  GATA2 Guide RNA
gaggaagggggagugaggcgu

SEQ ID NO: 33414 - RNA, 21 nt, Artificial Sequence
  GATA2 Guide RNA
gaggggguucagccacgcaca

SEQ ID NO: 33415 - RNA, 21 nt, Artificial Sequence
  GATA2 Guide RNA
gaggugucccgcacgccacgg

SEQ ID NO: 33416 - RNA, 21 nt, Artificial Sequence
  GATA2 Guide RNA
gagugaggcgugccgccagcg

SEQ ID NO: 33417 - RNA, 21 nt, Artificial Sequence
  GATA2 Guide RNA
gagugugcguggcugaacccc

SEQ ID NO: 33418 - RNA, 21 nt, Artificial Sequence
  GATA2 Guide RNA
gauccggcgagaaagagcacc

SEQ ID NO: 33419 - RNA, 21 nt, Artificial Sequence
  GATA2 Guide RNA
gaucugggcuggggcuccgug

SEQ ID NO: 33420 - RNA, 21 nt, Artificial Sequence
  GATA2 Guide RNA
gauucuggagccgcgggucac

SEQ ID NO: 33421 - RNA, 21 nt, Artificial Sequence
  GATA2 Guide RNA
gcaacggcccugcgcgaggaa

SEQ ID NO: 33422 - RNA, 21 nt, Artificial Sequence
  GATA2 Guide RNA
gcacacucacguggugacccg

SEQ ID NO: 33423 - RNA, 21 nt, Artificial Sequence
  GATA2 Guide RNA
gcaccagucccgggugggagg

SEQ ID NO: 33424 - RNA, 21 nt, Artificial Sequence
  GATA2 Guide RNA
gcacccagacccugagccgcc

SEQ ID NO: 33425 - RNA, 21 nt, Artificial Sequence
  GATA2 Guide RNA
gcacgccucacucccccuucc

SEQ ID NO: 33426 - RNA, 21 nt, Artificial Sequence
  GATA2 Guide RNA
gcagacggcaacggcccugcg

SEQ ID NO: 33427 - RNA, 21 nt, Artificial Sequence
  GATA2 Guide RNA
gcagggccguugccgucugca

SEQ ID NO: 33428 - RNA, 21 nt, Artificial Sequence
  GATA2 Guide RNA
gccacgcacacucacguggug

SEQ ID NO: 33429 - RNA, 21 nt, Artificial Sequence
  GATA2 Guide RNA
gccacggagccccagcccaga

SEQ ID NO: 33430 - RNA, 21 nt, Artificial Sequence
  GATA2 Guide RNA
gccagcgccugacacccccca

SEQ ID NO: 33431 - RNA, 21 nt, Artificial Sequence
  GATA2 Guide RNA
gcccaaggcucaaaacgaaag

SEQ ID NO: 33432 - RNA, 21 nt, Artificial Sequence
  GATA2 Guide RNA
gcccagauccggcgagaaaga

SEQ ID NO: 33433 - RNA, 21 nt, Artificial Sequence
  GATA2 Guide RNA
gccccagcccagauccggcga

SEQ ID NO: 33434 - RNA, 21 nt, Artificial Sequence
  GATA2 Guide RNA
gcccugcgcgaggaaggggga

SEQ ID NO: 33435 - RNA, 21 nt, Artificial Sequence
  GATA2 Guide RNA
gccgcgggucaccacgugagu

SEQ ID NO: 33436 - RNA, 21 nt, Artificial Sequence
  GATA2 Guide RNA
gccggaucugggcuggggcuc

SEQ ID NO: 33437 - RNA, 21 nt, Artificial Sequence
  GATA2 Guide RNA
gccgucugcacccagacccug

SEQ ID NO: 33438 - RNA, 21 nt, Artificial Sequence
  GATA2 Guide RNA
gccguugccgucugcacccag

SEQ ID NO: 33439 - RNA, 21 nt, Artificial Sequence
  GATA2 Guide RNA
gccucacucccccuuccucgc

SEQ ID NO: 33440 - RNA, 21 nt, Artificial Sequence
  GATA2 Guide RNA
gccugacaccccccaaagucc

SEQ ID NO: 33441 - RNA, 21 nt, Artificial Sequence
  GATA2 Guide RNA
gccuuccuuucguuuugagcc

SEQ ID NO: 33442 - RNA, 21 nt, Artificial Sequence
  GATA2 Guide RNA
gccuugggcuuuccucccacc

SEQ ID NO: 33443 - RNA, 21 nt, Artificial Sequence
  GATA2 Guide RNA
gcgagaaagagcaccaguccc

SEQ ID NO: 33444 - RNA, 21 nt, Artificial Sequence
  GATA2 Guide RNA
gcgaggaagggggagugaggc

SEQ ID NO: 33445 - RNA, 21 nt, Artificial Sequence
  GATA2 Guide RNA
gcgcagggccguugccgucug

SEQ ID NO: 33446 - RNA, 21 nt, Artificial Sequence
  GATA2 Guide RNA
gcgccugacaccccccaaagu

SEQ ID NO: 33447 - RNA, 21 nt, Artificial Sequence
  GATA2 Guide RNA
gcgcgaggaagggggagugag

SEQ ID NO: 33448 - RNA, 21 nt, Artificial Sequence
  GATA2 Guide RNA
gcgcuggcggcacgccucacu

SEQ ID NO: 33449 - RNA, 21 nt, Artificial Sequence
  GATA2 Guide RNA
gcggcacgccucacucccccu

SEQ ID NO: 33450 - RNA, 21 nt, Artificial Sequence
  GATA2 Guide RNA
gcggcggcucagggucugggu

SEQ ID NO: 33451 - RNA, 21 nt, Artificial Sequence
  GATA2 Guide RNA
gcggcucagggucugggugca

SEQ ID NO: 33452 - RNA, 21 nt, Artificial Sequence
  GATA2 Guide RNA
gcgggacaccucgugguggga

SEQ ID NO: 33453 - RNA, 21 nt, Artificial Sequence
  GATA2 Guide RNA
gcgggggaggggguucagcca

SEQ ID NO: 33454 - RNA, 21 nt, Artificial Sequence
  GATA2 Guide RNA
gcgggucaccacgugagugug

SEQ ID NO: 33455 - RNA, 21 nt, Artificial Sequence
  GATA2 Guide RNA
gcgugccgccagcgccugaca

SEQ ID NO: 33456 - RNA, 21 nt, Artificial Sequence
  GATA2 Guide RNA
gcgugcgggacaccucguggu

SEQ ID NO: 33457 - RNA, 21 nt, Artificial Sequence
  GATA2 Guide RNA
gcguggcugaacccccucccc

SEQ ID NO: 33458 - RNA, 21 nt, Artificial Sequence
  GATA2 Guide RNA
gcucaaaacgaaaggaaggcg

SEQ ID NO: 33459 - RNA, 21 nt, Artificial Sequence
  GATA2 Guide RNA
gcucagggucugggugcagac

SEQ ID NO: 33460 - RNA, 21 nt, Artificial Sequence
  GATA2 Guide RNA
gcuccguggcgugcgggacac

SEQ ID NO: 33461 - RNA, 21 nt, Artificial Sequence
  GATA2 Guide RNA
gcucuuucucgccggaucugg

SEQ ID NO: 33462 - RNA, 21 nt, Artificial Sequence
  GATA2 Guide RNA
gcugaacccccucccccgccu

SEQ ID NO: 33463 - RNA, 21 nt, Artificial Sequence
  GATA2 Guide RNA
gcuggcggcacgccucacucc

SEQ ID NO: 33464 - RNA, 21 nt, Artificial Sequence
  GATA2 Guide RNA
gcuuuccucccacccgggacu

SEQ ID NO: 33465 - RNA, 21 nt, Artificial Sequence
  GATA2 Guide RNA
ggaaagcccaaggcucaaaac

SEQ ID NO: 33466 - RNA, 21 nt, Artificial Sequence
  GATA2 Guide RNA
ggaaggcgggggaggggguuc

SEQ ID NO: 33467 - RNA, 21 nt, Artificial Sequence
  GATA2 Guide RNA
ggaagggggagugaggcgugc

SEQ ID NO: 33468 - RNA, 21 nt, Artificial Sequence
  GATA2 Guide RNA
ggacaccucguggugggacuu

SEQ ID NO: 33469 - RNA, 21 nt, Artificial Sequence
  GATA2 Guide RNA
ggacuggugcucuuucucgcc

SEQ ID NO: 33470 - RNA, 21 nt, Artificial Sequence
  GATA2 Guide RNA
ggacuuuggggggugucaggc

SEQ ID NO: 33471 - RNA, 21 nt, Artificial Sequence
  GATA2 Guide RNA
ggagccccagcccagauccgg

SEQ ID NO: 33472 - RNA, 21 nt, Artificial Sequence
  GATA2 Guide RNA
ggagccgcgggucaccacgug

SEQ ID NO: 33473 - RNA, 21 nt, Artificial Sequence
  GATA2 Guide RNA
ggaggaaagcccaaggcucaa

SEQ ID NO: 33474 - RNA, 21 nt, Artificial Sequence
  GATA2 Guide RNA
ggaggggguucagccacgcac

SEQ ID NO: 33475 - RNA, 21 nt, Artificial Sequence
  GATA2 Guide RNA
ggagugaggcgugccgccagc

SEQ ID NO: 33476 - RNA, 21 nt, Artificial Sequence
  GATA2 Guide RNA
ggaucugggcuggggcuccgu

SEQ ID NO: 33477 - RNA, 21 nt, Artificial Sequence
  GATA2 Guide RNA
ggcaacggcccugcgcgagga

SEQ ID NO: 33478 - RNA, 21 nt, Artificial Sequence
  GATA2 Guide RNA
ggcacgccucacucccccuuc

SEQ ID NO: 33479 - RNA, 21 nt, Artificial Sequence
  GATA2 Guide RNA
ggccguugccgucugcaccca

SEQ ID NO: 33480 - RNA, 21 nt, Artificial Sequence
  GATA2 Guide RNA
ggcgagaaagagcaccagucc

SEQ ID NO: 33481 - RNA, 21 nt, Artificial Sequence
  GATA2 Guide RNA
ggcggcucagggucugggugc

SEQ ID NO: 33482 - RNA, 21 nt, Artificial Sequence
  GATA2 Guide RNA
ggcgugcgggacaccucgugg

SEQ ID NO: 33483 - RNA, 21 nt, Artificial Sequence
  GATA2 Guide RNA
ggcucaaaacgaaaggaaggc

SEQ ID NO: 33484 - RNA, 21 nt, Artificial Sequence
  GATA2 Guide RNA
ggcucagggucugggugcaga

SEQ ID NO: 33485 - RNA, 21 nt, Artificial Sequence
  GATA2 Guide RNA
ggcuccguggcgugcgggaca

SEQ ID NO: 33486 - RNA, 21 nt, Artificial Sequence
  GATA2 Guide RNA
ggcuuuccucccacccgggac

SEQ ID NO: 33487 - RNA, 21 nt, Artificial Sequence
  GATA2 Guide RNA
gggacaccucguggugggacu

SEQ ID NO: 33488 - RNA, 21 nt, Artificial Sequence
  GATA2 Guide RNA
gggacuggugcucuuucucgc

SEQ ID NO: 33489 - RNA, 21 nt, Artificial Sequence
  GATA2 Guide RNA
gggacuuuggggggugucagg

SEQ ID NO: 33490 - RNA, 21 nt, Artificial Sequence
  GATA2 Guide RNA
gggaggaaagcccaaggcuca

SEQ ID NO: 33491 - RNA, 21 nt, Artificial Sequence
  GATA2 Guide RNA
gggaggggguucagccacgca

SEQ ID NO: 33492 - RNA, 21 nt, Artificial Sequence
  GATA2 Guide RNA
gggagugaggcgugccgccag

SEQ ID NO: 33493 - RNA, 21 nt, Artificial Sequence
  GATA2 Guide RNA
gggccguugccgucugcaccc

SEQ ID NO: 33494 - RNA, 21 nt, Artificial Sequence
  GATA2 Guide RNA
gggcuuuccucccacccggga

SEQ ID NO: 33495 - RNA, 21 nt, Artificial Sequence
  GATA2 Guide RNA
ggggaggggguucagccacgc

SEQ ID NO: 33496 - RNA, 21 nt, Artificial Sequence
  GATA2 Guide RNA
ggggagugaggcgugccgcca

SEQ ID NO: 33497 - RNA, 21 nt, Artificial Sequence
  GATA2 Guide RNA
gggggaggggguucagccacg

SEQ ID NO: 33498 - RNA, 21 nt, Artificial Sequence
  GATA2 Guide RNA
ggggguucagccacgcacacu

SEQ ID NO: 33499 - RNA, 21 nt, Artificial Sequence
  GATA2 Guide RNA
gggguucagccacgcacacuc

SEQ ID NO: 33500 - RNA, 21 nt, Artificial Sequence
  GATA2 Guide RNA
gggucaccacgugagugugcg

SEQ ID NO: 33501 - RNA, 21 nt, Artificial Sequence
  GATA2 Guide RNA
gggugcagacggcaacggccc

SEQ ID NO: 33502 - RNA, 21 nt, Artificial Sequence
  GATA2 Guide RNA
gggugggaggaaagcccaagg

SEQ ID NO: 33503 - RNA, 21 nt, Artificial Sequence
  GATA2 Guide RNA
gggugucaggcgcuggcggca

SEQ ID NO: 33504 - RNA, 21 nt, Artificial Sequence
  GATA2 Guide RNA
ggguucagccacgcacacuca

SEQ ID NO: 33505 - RNA, 21 nt, Artificial Sequence
  GATA2 Guide RNA
ggucaccacgugagugugcgu

SEQ ID NO: 33506 - RNA, 21 nt, Artificial Sequence
  GATA2 Guide RNA
ggugacccgcggcuccagaau

SEQ ID NO: 33507 - RNA, 21 nt, Artificial Sequence
  GATA2 Guide RNA
ggugcagacggcaacggcccu

SEQ ID NO: 33508 - RNA, 21 nt, Artificial Sequence
  GATA2 Guide RNA
ggugcucuuucucgccggauc

SEQ ID NO: 33509 - RNA, 21 nt, Artificial Sequence
  GATA2 Guide RNA
ggugggacuuugggggguguc

SEQ ID NO: 33510 - RNA, 21 nt, Artificial Sequence
  GATA2 Guide RNA
ggugggaggaaagcccaaggc

SEQ ID NO: 33511 - RNA, 21 nt, Artificial Sequence
  GATA2 Guide RNA
ggugucaggcgcuggcggcac

SEQ ID NO: 33512 - RNA, 21 nt, Artificial Sequence
  GATA2 Guide RNA
ggugucccgcacgccacggag

SEQ ID NO: 33513 - RNA, 21 nt, Artificial Sequence
  GATA2 Guide RNA
ggugugugauucuggagccgc

SEQ ID NO: 33514 - RNA, 21 nt, Artificial Sequence
  GATA2 Guide RNA
gguucagccacgcacacucac

SEQ ID NO: 33515 - RNA, 21 nt, Artificial Sequence
  GATA2 Guide RNA
gucaccacgugagugugcgug

SEQ ID NO: 33516 - RNA, 21 nt, Artificial Sequence
  GATA2 Guide RNA
gucccaccacgaggugucccg

SEQ ID NO: 33517 - RNA, 21 nt, Artificial Sequence
  GATA2 Guide RNA
gucccgggugggaggaaagcc

SEQ ID NO: 33518 - RNA, 21 nt, Artificial Sequence
  GATA2 Guide RNA
gucugcacccagacccugagc

SEQ ID NO: 33519 - RNA, 21 nt, Artificial Sequence
  GATA2 Guide RNA
gucugggugcagacggcaacg

SEQ ID NO: 33520 - RNA, 21 nt, Artificial Sequence
  GATA2 Guide RNA
gugacccgcggcuccagaauc

SEQ ID NO: 33521 - RNA, 21 nt, Artificial Sequence
  GATA2 Guide RNA
gugagugugcguggcugaacc

SEQ ID NO: 33522 - RNA, 21 nt, Artificial Sequence
  GATA2 Guide RNA
gugauucuggagccgcggguc

SEQ ID NO: 33523 - RNA, 21 nt, Artificial Sequence
  GATA2 Guide RNA
gugcagacggcaacggcccug

SEQ ID NO: 33524 - RNA, 21 nt, Artificial Sequence
  GATA2 Guide RNA
gugccgccagcgccugacacc

SEQ ID NO: 33525 - RNA, 21 nt, Artificial Sequence
  GATA2 Guide RNA
gugcgggacaccucguggugg

SEQ ID NO: 33526 - RNA, 21 nt, Artificial Sequence
  GATA2 Guide RNA
gugcguggcugaacccccucc

SEQ ID NO: 33527 - RNA, 21 nt, Artificial Sequence
  GATA2 Guide RNA
gugcucuuucucgccggaucu

SEQ ID NO: 33528 - RNA, 21 nt, Artificial Sequence
  GATA2 Guide RNA
guggcgugcgggacaccucgu

SEQ ID NO: 33529 - RNA, 21 nt, Artificial Sequence
  GATA2 Guide RNA
guggcugaacccccucccccg

SEQ ID NO: 33530 - RNA, 21 nt, Artificial Sequence
  GATA2 Guide RNA
gugggacuuugggggguguca

SEQ ID NO: 33531 - RNA, 21 nt, Artificial Sequence
  GATA2 Guide RNA
gugggaggaaagcccaaggcu

SEQ ID NO: 33532 - RNA, 21 nt, Artificial Sequence
  GATA2 Guide RNA
guggugacccgcggcuccaga

SEQ ID NO: 33533 - RNA, 21 nt, Artificial Sequence
  GATA2 Guide RNA
guggugggacuuuggggggug

SEQ ID NO: 33534 - RNA, 21 nt, Artificial Sequence
  GATA2 Guide RNA
gugucaggcgcuggcggcacg

SEQ ID NO: 33535 - RNA, 21 nt, Artificial Sequence
  GATA2 Guide RNA
gugucccgcacgccacggagc

SEQ ID NO: 33536 - RNA, 21 nt, Artificial Sequence
  GATA2 Guide RNA
gugugauucuggagccgcggg

SEQ ID NO: 33537 - RNA, 21 nt, Artificial Sequence
  GATA2 Guide RNA
gugugcguggcugaacccccu

SEQ ID NO: 33538 - RNA, 21 nt, Artificial Sequence
  GATA2 Guide RNA
gugugugauucuggagccgcg

SEQ ID NO: 33539 - RNA, 21 nt, Artificial Sequence
  GATA2 Guide RNA
guucagccacgcacacucacg

SEQ ID NO: 33540 - RNA, 21 nt, Artificial Sequence
  GATA2 Guide RNA
guugccgucugcacccagacc

SEQ ID NO: 33541 - RNA, 21 nt, Artificial Sequence
  GATA2 Guide RNA
guuuugagccuugggcuuucc

SEQ ID NO: 33542 - RNA, 21 nt, Artificial Sequence
  GATA2 Guide RNA
ucaaaacgaaaggaaggcggg

SEQ ID NO: 33543 - RNA, 21 nt, Artificial Sequence
  GATA2 Guide RNA
ucaccacgugagugugcgugg

SEQ ID NO: 33544 - RNA, 21 nt, Artificial Sequence
  GATA2 Guide RNA
ucacguggugacccgcggcuc

SEQ ID NO: 33545 - RNA, 21 nt, Artificial Sequence
  GATA2 Guide RNA
ucacucccccuuccucgcgca

SEQ ID NO: 33546 - RNA, 21 nt, Artificial Sequence
  GATA2 Guide RNA
ucagccacgcacacucacgug

SEQ ID NO: 33547 - RNA, 21 nt, Artificial Sequence
  GATA2 Guide RNA
ucaggcgcuggcggcacgccu

SEQ ID NO: 33548 - RNA, 21 nt, Artificial Sequence
  GATA2 Guide RNA
ucagggucugggugcagacgg

SEQ ID NO: 33549 - RNA, 21 nt, Artificial Sequence
  GATA2 Guide RNA
ucccaccacgaggugucccgc

SEQ ID NO: 33550 - RNA, 21 nt, Artificial Sequence
  GATA2 Guide RNA
ucccacccgggacuggugcuc

SEQ ID NO: 33551 - RNA, 21 nt, Artificial Sequence
  GATA2 Guide RNA
ucccccgccuuccuuucguuu

SEQ ID NO: 33552 - RNA, 21 nt, Artificial Sequence
  GATA2 Guide RNA
ucccgggugggaggaaagccc

SEQ ID NO: 33553 - RNA, 21 nt, Artificial Sequence
  GATA2 Guide RNA
uccggcgagaaagagcaccag

SEQ ID NO: 33554 - RNA, 21 nt, Artificial Sequence
  GATA2 Guide RNA
uccguggcgugcgggacaccu

SEQ ID NO: 33555 - RNA, 21 nt, Artificial Sequence
  GATA2 Guide RNA
uccucccacccgggacuggug

SEQ ID NO: 33556 - RNA, 21 nt, Artificial Sequence
  GATA2 Guide RNA
uccucgcgcagggccguugcc

SEQ ID NO: 33557 - RNA, 21 nt, Artificial Sequence
  GATA2 Guide RNA
uccuuucguuuugagccuugg

SEQ ID NO: 33558 - RNA, 21 nt, Artificial Sequence
  GATA2 Guide RNA
ucgccggaucugggcuggggc

SEQ ID NO: 33559 - RNA, 21 nt, Artificial Sequence
  GATA2 Guide RNA
ucgcgcagggccguugccguc

SEQ ID NO: 33560 - RNA, 21 nt, Artificial Sequence
  GATA2 Guide RNA
ucguggugggacuuugggggg

SEQ ID NO: 33561 - RNA, 21 nt, Artificial Sequence
  GATA2 Guide RNA
ucguuuugagccuugggcuuu

SEQ ID NO: 33562 - RNA, 21 nt, Artificial Sequence
  GATA2 Guide RNA
ucucgccggaucugggcuggg

SEQ ID NO: 33563 - RNA, 21 nt, Artificial Sequence
  GATA2 Guide RNA
ucugcacccagacccugagcc

SEQ ID NO: 33564 - RNA, 21 nt, Artificial Sequence
  GATA2 Guide RNA
ucuggagccgcgggucaccac

SEQ ID NO: 33565 - RNA, 21 nt, Artificial Sequence
  GATA2 Guide RNA
ucugggcuggggcuccguggc

SEQ ID NO: 33566 - RNA, 21 nt, Artificial Sequence
  GATA2 Guide RNA
ucugggugcagacggcaacgg

SEQ ID NO: 33567 - RNA, 21 nt, Artificial Sequence
  GATA2 Guide RNA
ucuuucucgccggaucugggc

SEQ ID NO: 33568 - RNA, 21 nt, Artificial Sequence
  GATA2 Guide RNA
ugaacccccucccccgccuuc

SEQ ID NO: 33569 - RNA, 21 nt, Artificial Sequence
  GATA2 Guide RNA
ugacaccccccaaagucccac

SEQ ID NO: 33570 - RNA, 21 nt, Artificial Sequence
  GATA2 Guide RNA
ugacccgcggcuccagaauca

SEQ ID NO: 33571 - RNA, 21 nt, Artificial Sequence
  GATA2 Guide RNA
ugagccuugggcuuuccuccc

SEQ ID NO: 33572 - RNA, 21 nt, Artificial Sequence
  GATA2 Guide RNA
ugaggcgugccgccagcgccu

SEQ ID NO: 33573 - RNA, 21 nt, Artificial Sequence
  GATA2 Guide RNA
ugagugugcguggcugaaccc

SEQ ID NO: 33574 - RNA, 21 nt, Artificial Sequence
  GATA2 Guide RNA
ugauucuggagccgcggguca

SEQ ID NO: 33575 - RNA, 21 nt, Artificial Sequence
  GATA2 Guide RNA
ugcacccagacccugagccgc

SEQ ID NO: 33576 - RNA, 21 nt, Artificial Sequence
  GATA2 Guide RNA
ugcagacggcaacggcccugc

SEQ ID NO: 33577 - RNA, 21 nt, Artificial Sequence
  GATA2 Guide RNA
ugccgccagcgccugacaccc

SEQ ID NO: 33578 - RNA, 21 nt, Artificial Sequence
  GATA2 Guide RNA
ugccgucugcacccagacccu

SEQ ID NO: 33579 - RNA, 21 nt, Artificial Sequence
  GATA2 Guide RNA
ugcgcgaggaagggggaguga

SEQ ID NO: 33580 - RNA, 21 nt, Artificial Sequence
  GATA2 Guide RNA
ugcgggacaccucgugguggg

SEQ ID NO: 33581 - RNA, 21 nt, Artificial Sequence
  GATA2 Guide RNA
ugcguggcugaacccccuccc

SEQ ID NO: 33582 - RNA, 21 nt, Artificial Sequence
  GATA2 Guide RNA
ugcucuuucucgccggaucug

SEQ ID NO: 33583 - RNA, 21 nt, Artificial Sequence
  GATA2 Guide RNA
uggagccgcgggucaccacgu

SEQ ID NO: 33584 - RNA, 21 nt, Artificial Sequence
  GATA2 Guide RNA
uggcggcacgccucacucccc

SEQ ID NO: 33585 - RNA, 21 nt, Artificial Sequence
  GATA2 Guide RNA
uggcgugcgggacaccucgug

SEQ ID NO: 33586 - RNA, 21 nt, Artificial Sequence
  GATA2 Guide RNA
uggcugaacccccucccccgc

SEQ ID NO: 33587 - RNA, 21 nt, Artificial Sequence
  GATA2 Guide RNA
ugggacuuuggggggugucag

SEQ ID NO: 33588 - RNA, 21 nt, Artificial Sequence
  GATA2 Guide RNA
ugggaggaaagcccaaggcuc

SEQ ID NO: 33589 - RNA, 21 nt, Artificial Sequence
  GATA2 Guide RNA
ugggcuggggcuccguggcgu

SEQ ID NO: 33590 - RNA, 21 nt, Artificial Sequence
  GATA2 Guide RNA
ugggcuuuccucccacccggg

SEQ ID NO: 33591 - RNA, 21 nt, Artificial Sequence
  GATA2 Guide RNA
uggggggugucaggcgcuggc

SEQ ID NO: 33592 - RNA, 21 nt, Artificial Sequence
  GATA2 Guide RNA
ugggugcagacggcaacggcc

SEQ ID NO: 33593 - RNA, 21 nt, Artificial Sequence
  GATA2 Guide RNA
uggugacccgcggcuccagaa

SEQ ID NO: 33594 - RNA, 21 nt, Artificial Sequence
  GATA2 Guide RNA
uggugcucuuucucgccggau

SEQ ID NO: 33595 - RNA, 21 nt, Artificial Sequence
  GATA2 Guide RNA
uggugggacuuuggggggugu

SEQ ID NO: 33596 - RNA, 21 nt, Artificial Sequence
  GATA2 Guide RNA
ugucaggcgcuggcggcacgc

SEQ ID NO: 33597 - RNA, 21 nt, Artificial Sequence
  GATA2 Guide RNA
ugucccgcacgccacggagcc

SEQ ID NO: 33598 - RNA, 21 nt, Artificial Sequence
  GATA2 Guide RNA
ugugauucuggagccgcgggu

SEQ ID NO: 33599 - RNA, 21 nt, Artificial Sequence
  GATA2 Guide RNA
ugugcguggcugaacccccuc

SEQ ID NO: 33600 - RNA, 21 nt, Artificial Sequence
  GATA2 Guide RNA
ugugugauucuggagccgcgg

SEQ ID NO: 33601 - RNA, 21 nt, Artificial Sequence
  GATA2 Guide RNA
uucagccacgcacacucacgu

SEQ ID NO: 33602 - RNA, 21 nt, Artificial Sequence
  GATA2 Guide RNA
uuccucccacccgggacuggu

SEQ ID NO: 33603 - RNA, 21 nt, Artificial Sequence
  GATA2 Guide RNA
uuccucgcgcagggccguugc

SEQ ID NO: 33604 - RNA, 21 nt, Artificial Sequence
  GATA2 Guide RNA
uuccuuucguuuugagccuug

SEQ ID NO: 33605 - RNA, 21 nt, Artificial Sequence
  GATA2 Guide RNA
uucguuuugagccuugggcuu

SEQ ID NO: 33606 - RNA, 21 nt, Artificial Sequence
  GATA2 Guide RNA
uucucgccggaucugggcugg

SEQ ID NO: 33607 - RNA, 21 nt, Artificial Sequence
  GATA2 Guide RNA
uucuggagccgcgggucacca

SEQ ID NO: 33608 - RNA, 21 nt, Artificial Sequence
  GATA2 Guide RNA
uugagccuugggcuuuccucc

SEQ ID NO: 33609 - RNA, 21 nt, Artificial Sequence
  GATA2 Guide RNA
uugccgucugcacccagaccc

SEQ ID NO: 33610 - RNA, 21 nt, Artificial Sequence
  GATA2 Guide RNA
uugggcuuuccucccacccgg

SEQ ID NO: 33611 - RNA, 21 nt, Artificial Sequence
  GATA2 Guide RNA
uuggggggugucaggcgcugg

SEQ ID NO: 33612 - RNA, 21 nt, Artificial Sequence
  GATA2 Guide RNA
uuuccucccacccgggacugg

SEQ ID NO: 33613 - RNA, 21 nt, Artificial Sequence
  GATA2 Guide RNA
uuucguuuugagccuugggcu

SEQ ID NO: 33614 - RNA, 21 nt, Artificial Sequence
  GATA2 Guide RNA
uuucucgccggaucugggcug

SEQ ID NO: 33615 - RNA, 21 nt, Artificial Sequence
  GATA2 Guide RNA
uuugagccuugggcuuuccuc

SEQ ID NO: 33616 - RNA, 21 nt, Artificial Sequence
  GATA2 Guide RNA
uuuggggggugucaggcgcug

SEQ ID NO: 33617 - RNA, 21 nt, Artificial Sequence
  GATA2 Guide RNA
uuuugagccuugggcuuuccu

SEQ ID NO: 33618 - RNA, 22 nt, Artificial Sequence
  GATA2 Guide RNA
aaaacgaaaggaaggcggggga

SEQ ID NO: 33619 - RNA, 22 nt, Artificial Sequence
  GATA2 Guide RNA
aaacgaaaggaaggcgggggag

SEQ ID NO: 33620 - RNA, 22 nt, Artificial Sequence
  GATA2 Guide RNA
aaagagcaccagucccgggugg

SEQ ID NO: 33621 - RNA, 22 nt, Artificial Sequence
  GATA2 Guide RNA
aaagcccaaggcucaaaacgaa

SEQ ID NO: 33622 - RNA, 22 nt, Artificial Sequence
  GATA2 Guide RNA
aaaggaaggcgggggagggggu

SEQ ID NO: 33623 - RNA, 22 nt, Artificial Sequence
  GATA2 Guide RNA
aaagucccaccacgaggugucc

SEQ ID NO: 33624 - RNA, 22 nt, Artificial Sequence
  GATA2 Guide RNA
aacccccucccccgccuuccuu

SEQ ID NO: 33625 - RNA, 22 nt, Artificial Sequence
  GATA2 Guide RNA
aacgaaaggaaggcgggggagg

SEQ ID NO: 33626 - RNA, 22 nt, Artificial Sequence
  GATA2 Guide RNA
aacggcccugcgcgaggaaggg

SEQ ID NO: 33627 - RNA, 22 nt, Artificial Sequence
  GATA2 Guide RNA
aagagcaccagucccggguggg

SEQ ID NO: 33628 - RNA, 22 nt, Artificial Sequence
  GATA2 Guide RNA
aagcccaaggcucaaaacgaaa

SEQ ID NO: 33629 - RNA, 22 nt, Artificial Sequence
  GATA2 Guide RNA
aaggaaggcgggggaggggguu

SEQ ID NO: 33630 - RNA, 22 nt, Artificial Sequence
  GATA2 Guide RNA
aaggcgggggaggggguucagc

SEQ ID NO: 33631 - RNA, 22 nt, Artificial Sequence
  GATA2 Guide RNA
aaggcucaaaacgaaaggaagg

SEQ ID NO: 33632 - RNA, 22 nt, Artificial Sequence
  GATA2 Guide RNA
aagggggagugaggcgugccgc

SEQ ID NO: 33633 - RNA, 22 nt, Artificial Sequence
  GATA2 Guide RNA
aagucccaccacgagguguccc

SEQ ID NO: 33634 - RNA, 22 nt, Artificial Sequence
  GATA2 Guide RNA
acaccccccaaagucccaccac

SEQ ID NO: 33635 - RNA, 22 nt, Artificial Sequence
  GATA2 Guide RNA
acaccucguggugggacuuugg

SEQ ID NO: 33636 - RNA, 22 nt, Artificial Sequence
  GATA2 Guide RNA
acacucacguggugacccgcgg

SEQ ID NO: 33637 - RNA, 22 nt, Artificial Sequence
  GATA2 Guide RNA
accacgaggugucccgcacgcc

SEQ ID NO: 33638 - RNA, 22 nt, Artificial Sequence
  GATA2 Guide RNA
accacgugagugugcguggcug

SEQ ID NO: 33639 - RNA, 22 nt, Artificial Sequence
  GATA2 Guide RNA
accagucccgggugggaggaaa

SEQ ID NO: 33640 - RNA, 22 nt, Artificial Sequence
  GATA2 Guide RNA
accccccaaagucccaccacga

SEQ ID NO: 33641 - RNA, 22 nt, Artificial Sequence
  GATA2 Guide RNA
acccccucccccgccuuccuuu

SEQ ID NO: 33642 - RNA, 22 nt, Artificial Sequence
  GATA2 Guide RNA
acccgggacuggugcucuuucu

SEQ ID NO: 33643 - RNA, 22 nt, Artificial Sequence
  GATA2 Guide RNA
accucguggugggacuuugggg

SEQ ID NO: 33644 - RNA, 22 nt, Artificial Sequence
  GATA2 Guide RNA
acgaaaggaaggcgggggaggg

SEQ ID NO: 33645 - RNA, 22 nt, Artificial Sequence
  GATA2 Guide RNA
acgaggugucccgcacgccacg

SEQ ID NO: 33646 - RNA, 22 nt, Artificial Sequence
  GATA2 Guide RNA
acgcacacucacguggugaccc

SEQ ID NO: 33647 - RNA, 22 nt, Artificial Sequence
  GATA2 Guide RNA
acgccacggagccccagcccag

SEQ ID NO: 33648 - RNA, 22 nt, Artificial Sequence
  GATA2 Guide RNA
acgccucacucccccuuccucg

SEQ ID NO: 33649 - RNA, 22 nt, Artificial Sequence
  GATA2 Guide RNA
acggagccccagcccagauccg

SEQ ID NO: 33650 - RNA, 22 nt, Artificial Sequence
  GATA2 Guide RNA
acggcaacggcccugcgcgagg

SEQ ID NO: 33651 - RNA, 22 nt, Artificial Sequence
  GATA2 Guide RNA
acggcccugcgcgaggaagggg

SEQ ID NO: 33652 - RNA, 22 nt, Artificial Sequence
  GATA2 Guide RNA
acgugagugugcguggcugaac

SEQ ID NO: 33653 - RNA, 22 nt, Artificial Sequence
  GATA2 Guide RNA
acguggugacccgcggcuccag

SEQ ID NO: 33654 - RNA, 22 nt, Artificial Sequence
  GATA2 Guide RNA
acucacguggugacccgcggcu

SEQ ID NO: 33655 - RNA, 22 nt, Artificial Sequence
  GATA2 Guide RNA
acuggugcucuuucucgccgga

SEQ ID NO: 33656 - RNA, 22 nt, Artificial Sequence
  GATA2 Guide RNA
acuuuggggggugucaggcgcu

SEQ ID NO: 33657 - RNA, 22 nt, Artificial Sequence
  GATA2 Guide RNA
agaaagagcaccagucccgggu

SEQ ID NO: 33658 - RNA, 22 nt, Artificial Sequence
  GATA2 Guide RNA
agacggcaacggcccugcgcga

SEQ ID NO: 33659 - RNA, 22 nt, Artificial Sequence
  GATA2 Guide RNA
agagcaccagucccggguggga

SEQ ID NO: 33660 - RNA, 22 nt, Artificial Sequence
  GATA2 Guide RNA
agauccggcgagaaagagcacc

SEQ ID NO: 33661 - RNA, 22 nt, Artificial Sequence
  GATA2 Guide RNA
agcaccagucccgggugggagg

SEQ ID NO: 33662 - RNA, 22 nt, Artificial Sequence
  GATA2 Guide RNA
agccacgcacacucacguggug

SEQ ID NO: 33663 - RNA, 22 nt, Artificial Sequence
  GATA2 Guide RNA
agcccaaggcucaaaacgaaag

SEQ ID NO: 33664 - RNA, 22 nt, Artificial Sequence
  GATA2 Guide RNA
agcccagauccggcgagaaaga

SEQ ID NO: 33665 - RNA, 22 nt, Artificial Sequence
  GATA2 Guide RNA
agccccagcccagauccggcga

SEQ ID NO: 33666 - RNA, 22 nt, Artificial Sequence
  GATA2 Guide RNA
agccgcgggucaccacgugagu

SEQ ID NO: 33667 - RNA, 22 nt, Artificial Sequence
  GATA2 Guide RNA
agccuugggcuuuccucccacc

SEQ ID NO: 33668 - RNA, 22 nt, Artificial Sequence
  GATA2 Guide RNA
agcgccugacaccccccaaagu

SEQ ID NO: 33669 - RNA, 22 nt, Artificial Sequence
  GATA2 Guide RNA
aggaaagcccaaggcucaaaac

SEQ ID NO: 33670 - RNA, 22 nt, Artificial Sequence
  GATA2 Guide RNA
aggaaggcgggggaggggguuc

SEQ ID NO: 33671 - RNA, 22 nt, Artificial Sequence
  GATA2 Guide RNA
aggaagggggagugaggcgugc

SEQ ID NO: 33672 - RNA, 22 nt, Artificial Sequence
  GATA2 Guide RNA
aggcgcuggcggcacgccucac

SEQ ID NO: 33673 - RNA, 22 nt, Artificial Sequence
  GATA2 Guide RNA
aggcgggggaggggguucagcc

SEQ ID NO: 33674 - RNA, 22 nt, Artificial Sequence
  GATA2 Guide RNA
aggcgugccgccagcgccugac

SEQ ID NO: 33675 - RNA, 22 nt, Artificial Sequence
  GATA2 Guide RNA
aggcucaaaacgaaaggaaggc

SEQ ID NO: 33676 - RNA, 22 nt, Artificial Sequence
  GATA2 Guide RNA
agggccguugccgucugcaccc

SEQ ID NO: 33677 - RNA, 22 nt, Artificial Sequence
  GATA2 Guide RNA
agggggagugaggcgugccgcc

SEQ ID NO: 33678 - RNA, 22 nt, Artificial Sequence
  GATA2 Guide RNA
aggggguucagccacgcacacu

SEQ ID NO: 33679 - RNA, 22 nt, Artificial Sequence
  GATA2 Guide RNA
aggugucccgcacgccacggag

SEQ ID NO: 33680 - RNA, 22 nt, Artificial Sequence
  GATA2 Guide RNA
agucccaccacgaggugucccg

SEQ ID NO: 33681 - RNA, 22 nt, Artificial Sequence
  GATA2 Guide RNA
agucccgggugggaggaaagcc

SEQ ID NO: 33682 - RNA, 22 nt, Artificial Sequence
  GATA2 Guide RNA
agugaggcgugccgccagcgcc

SEQ ID NO: 33683 - RNA, 22 nt, Artificial Sequence
  GATA2 Guide RNA
agugugcguggcugaacccccu

SEQ ID NO: 33684 - RNA, 22 nt, Artificial Sequence
  GATA2 Guide RNA
auccggcgagaaagagcaccag

SEQ ID NO: 33685 - RNA, 22 nt, Artificial Sequence
  GATA2 Guide RNA
aucugggcuggggcuccguggc

SEQ ID NO: 33686 - RNA, 22 nt, Artificial Sequence
  GATA2 Guide RNA
auucuggagccgcgggucacca

SEQ ID NO: 33687 - RNA, 22 nt, Artificial Sequence
  GATA2 Guide RNA
caaaacgaaaggaaggcggggg

SEQ ID NO: 33688 - RNA, 22 nt, Artificial Sequence
  GATA2 Guide RNA
caaagucccaccacgagguguc

SEQ ID NO: 33689 - RNA, 22 nt, Artificial Sequence
  GATA2 Guide RNA
caacggcccugcgcgaggaagg

SEQ ID NO: 33690 - RNA, 22 nt, Artificial Sequence
  GATA2 Guide RNA
caaggcucaaaacgaaaggaag

SEQ ID NO: 33691 - RNA, 22 nt, Artificial Sequence
  GATA2 Guide RNA
cacacucacguggugacccgcg

SEQ ID NO: 33692 - RNA, 22 nt, Artificial Sequence
  GATA2 Guide RNA
caccacgaggugucccgcacgc

SEQ ID NO: 33693 - RNA, 22 nt, Artificial Sequence
  GATA2 Guide RNA
caccacgugagugugcguggcu

SEQ ID NO: 33694 - RNA, 22 nt, Artificial Sequence
  GATA2 Guide RNA
caccagucccgggugggaggaa

SEQ ID NO: 33695 - RNA, 22 nt, Artificial Sequence
  GATA2 Guide RNA
caccccccaaagucccaccacg

SEQ ID NO: 33696 - RNA, 22 nt, Artificial Sequence
  GATA2 Guide RNA
cacccgggacuggugcucuuuc

SEQ ID NO: 33697 - RNA, 22 nt, Artificial Sequence
  GATA2 Guide RNA
caccucguggugggacuuuggg

SEQ ID NO: 33698 - RNA, 22 nt, Artificial Sequence
  GATA2 Guide RNA
cacgaggugucccgcacgccac

SEQ ID NO: 33699 - RNA, 22 nt, Artificial Sequence
  GATA2 Guide RNA
cacgcacacucacguggugacc

SEQ ID NO: 33700 - RNA, 22 nt, Artificial Sequence
  GATA2 Guide RNA
cacgccacggagccccagccca

SEQ ID NO: 33701 - RNA, 22 nt, Artificial Sequence
  GATA2 Guide RNA
cacgccucacucccccuuccuc

SEQ ID NO: 33702 - RNA, 22 nt, Artificial Sequence
  GATA2 Guide RNA
cacggagccccagcccagaucc

SEQ ID NO: 33703 - RNA, 22 nt, Artificial Sequence
  GATA2 Guide RNA
cacgugagugugcguggcugaa

SEQ ID NO: 33704 - RNA, 22 nt, Artificial Sequence
  GATA2 Guide RNA
cacguggugacccgcggcucca

SEQ ID NO: 33705 - RNA, 22 nt, Artificial Sequence
  GATA2 Guide RNA
cacucacguggugacccgcggc

SEQ ID NO: 33706 - RNA, 22 nt, Artificial Sequence
  GATA2 Guide RNA
cagacggcaacggcccugcgcg

SEQ ID NO: 33707 - RNA, 22 nt, Artificial Sequence
  GATA2 Guide RNA
cagauccggcgagaaagagcac

SEQ ID NO: 33708 - RNA, 22 nt, Artificial Sequence
  GATA2 Guide RNA
cagccacgcacacucacguggu

SEQ ID NO: 33709 - RNA, 22 nt, Artificial Sequence
  GATA2 Guide RNA
cagcccagauccggcgagaaag

SEQ ID NO: 33710 - RNA, 22 nt, Artificial Sequence
  GATA2 Guide RNA
cagcgccugacaccccccaaag

SEQ ID NO: 33711 - RNA, 22 nt, Artificial Sequence
  GATA2 Guide RNA
caggcgcuggcggcacgccuca

SEQ ID NO: 33712 - RNA, 22 nt, Artificial Sequence
  GATA2 Guide RNA
cagggccguugccgucugcacc

SEQ ID NO: 33713 - RNA, 22 nt, Artificial Sequence
  GATA2 Guide RNA
cagucccgggugggaggaaagc

SEQ ID NO: 33714 - RNA, 22 nt, Artificial Sequence
  GATA2 Guide RNA
ccaaagucccaccacgaggugu

SEQ ID NO: 33715 - RNA, 22 nt, Artificial Sequence
  GATA2 Guide RNA
ccaaggcucaaaacgaaaggaa

SEQ ID NO: 33716 - RNA, 22 nt, Artificial Sequence
  GATA2 Guide RNA
ccaccacgaggugucccgcacg

SEQ ID NO: 33717 - RNA, 22 nt, Artificial Sequence
  GATA2 Guide RNA
ccacccgggacuggugcucuuu

SEQ ID NO: 33718 - RNA, 22 nt, Artificial Sequence
  GATA2 Guide RNA
ccacgaggugucccgcacgcca

SEQ ID NO: 33719 - RNA, 22 nt, Artificial Sequence
  GATA2 Guide RNA
ccacgcacacucacguggugac

SEQ ID NO: 33720 - RNA, 22 nt, Artificial Sequence
  GATA2 Guide RNA
ccacggagccccagcccagauc

SEQ ID NO: 33721 - RNA, 22 nt, Artificial Sequence
  GATA2 Guide RNA
ccacgugagugugcguggcuga

SEQ ID NO: 33722 - RNA, 22 nt, Artificial Sequence
  GATA2 Guide RNA
ccagauccggcgagaaagagca

SEQ ID NO: 33723 - RNA, 22 nt, Artificial Sequence
  GATA2 Guide RNA
ccagcccagauccggcgagaaa

SEQ ID NO: 33724 - RNA, 22 nt, Artificial Sequence
  GATA2 Guide RNA
ccagcgccugacaccccccaaa

SEQ ID NO: 33725 - RNA, 22 nt, Artificial Sequence
  GATA2 Guide RNA
ccagucccgggugggaggaaag

SEQ ID NO: 33726 - RNA, 22 nt, Artificial Sequence
  GATA2 Guide RNA
cccaaagucccaccacgaggug

SEQ ID NO: 33727 - RNA, 22 nt, Artificial Sequence
  GATA2 Guide RNA
cccaaggcucaaaacgaaagga

SEQ ID NO: 33728 - RNA, 22 nt, Artificial Sequence
  GATA2 Guide RNA
cccaccacgaggugucccgcac

SEQ ID NO: 33729 - RNA, 22 nt, Artificial Sequence
  GATA2 Guide RNA
cccacccgggacuggugcucuu

SEQ ID NO: 33730 - RNA, 22 nt, Artificial Sequence
  GATA2 Guide RNA
cccagauccggcgagaaagagc

SEQ ID NO: 33731 - RNA, 22 nt, Artificial Sequence
  GATA2 Guide RNA
cccagcccagauccggcgagaa

SEQ ID NO: 33732 - RNA, 22 nt, Artificial Sequence
  GATA2 Guide RNA
ccccaaagucccaccacgaggu

SEQ ID NO: 33733 - RNA, 22 nt, Artificial Sequence
  GATA2 Guide RNA
ccccagcccagauccggcgaga

SEQ ID NO: 33734 - RNA, 22 nt, Artificial Sequence
  GATA2 Guide RNA
cccccaaagucccaccacgagg

SEQ ID NO: 33735 - RNA, 22 nt, Artificial Sequence
  GATA2 Guide RNA
ccccccaaagucccaccacgag

SEQ ID NO: 33736 - RNA, 22 nt, Artificial Sequence
  GATA2 Guide RNA
cccccgccuuccuuucguuuug

SEQ ID NO: 33737 - RNA, 22 nt, Artificial Sequence
  GATA2 Guide RNA
cccccucccccgccuuccuuuc

SEQ ID NO: 33738 - RNA, 22 nt, Artificial Sequence
  GATA2 Guide RNA
ccccgccuuccuuucguuuuga

SEQ ID NO: 33739 - RNA, 22 nt, Artificial Sequence
  GATA2 Guide RNA
ccccucccccgccuuccuuucg

SEQ ID NO: 33740 - RNA, 22 nt, Artificial Sequence
  GATA2 Guide RNA
ccccuuccucgcgcagggccgu

SEQ ID NO: 33741 - RNA, 22 nt, Artificial Sequence
  GATA2 Guide RNA
cccgccuuccuuucguuuugag

SEQ ID NO: 33742 - RNA, 22 nt, Artificial Sequence
  GATA2 Guide RNA
cccgggacuggugcucuuucuc

SEQ ID NO: 33743 - RNA, 22 nt, Artificial Sequence
  GATA2 Guide RNA
cccgggugggaggaaagcccaa

SEQ ID NO: 33744 - RNA, 22 nt, Artificial Sequence
  GATA2 Guide RNA
cccucccccgccuuccuuucgu

SEQ ID NO: 33745 - RNA, 22 nt, Artificial Sequence
  GATA2 Guide RNA
cccugcgcgaggaagggggagu

SEQ ID NO: 33746 - RNA, 22 nt, Artificial Sequence
  GATA2 Guide RNA
cccuuccucgcgcagggccguu

SEQ ID NO: 33747 - RNA, 22 nt, Artificial Sequence
  GATA2 Guide RNA
ccgccuuccuuucguuuugagc

SEQ ID NO: 33748 - RNA, 22 nt, Artificial Sequence
  GATA2 Guide RNA
ccgcgggucaccacgugagugu

SEQ ID NO: 33749 - RNA, 22 nt, Artificial Sequence
  GATA2 Guide RNA
ccggaucugggcuggggcuccg

SEQ ID NO: 33750 - RNA, 22 nt, Artificial Sequence
  GATA2 Guide RNA
ccggcgagaaagagcaccaguc

SEQ ID NO: 33751 - RNA, 22 nt, Artificial Sequence
  GATA2 Guide RNA
ccgggacuggugcucuuucucg

SEQ ID NO: 33752 - RNA, 22 nt, Artificial Sequence
  GATA2 Guide RNA
ccgggugggaggaaagcccaag

SEQ ID NO: 33753 - RNA, 22 nt, Artificial Sequence
  GATA2 Guide RNA
ccgucugcacccagacccugag

SEQ ID NO: 33754 - RNA, 22 nt, Artificial Sequence
  GATA2 Guide RNA
ccguggcgugcgggacaccucg

SEQ ID NO: 33755 - RNA, 22 nt, Artificial Sequence
  GATA2 Guide RNA
ccguugccgucugcacccagac

SEQ ID NO: 33756 - RNA, 22 nt, Artificial Sequence
  GATA2 Guide RNA
ccucacucccccuuccucgcgc

SEQ ID NO: 33757 - RNA, 22 nt, Artificial Sequence
  GATA2 Guide RNA
ccucccacccgggacuggugcu

SEQ ID NO: 33758 - RNA, 22 nt, Artificial Sequence
  GATA2 Guide RNA
ccucccccgccuuccuuucguu

SEQ ID NO: 33759 - RNA, 22 nt, Artificial Sequence
  GATA2 Guide RNA
ccucgcgcagggccguugccgu

SEQ ID NO: 33760 - RNA, 22 nt, Artificial Sequence
  GATA2 Guide RNA
ccucguggugggacuuuggggg

SEQ ID NO: 33761 - RNA, 22 nt, Artificial Sequence
  GATA2 Guide RNA
ccugacaccccccaaaguccca

SEQ ID NO: 33762 - RNA, 22 nt, Artificial Sequence
  GATA2 Guide RNA
ccugcgcgaggaagggggagug

SEQ ID NO: 33763 - RNA, 22 nt, Artificial Sequence
  GATA2 Guide RNA
ccuuccucgcgcagggccguug

SEQ ID NO: 33764 - RNA, 22 nt, Artificial Sequence
  GATA2 Guide RNA
ccuuccuuucguuuugagccuu

SEQ ID NO: 33765 - RNA, 22 nt, Artificial Sequence
  GATA2 Guide RNA
ccuugggcuuuccucccacccg

SEQ ID NO: 33766 - RNA, 22 nt, Artificial Sequence
  GATA2 Guide RNA
ccuuucguuuugagccuugggc

SEQ ID NO: 33767 - RNA, 22 nt, Artificial Sequence
  GATA2 Guide RNA
cgaaaggaaggcgggggagggg

SEQ ID NO: 33768 - RNA, 22 nt, Artificial Sequence
  GATA2 Guide RNA
cgagaaagagcaccagucccgg

SEQ ID NO: 33769 - RNA, 22 nt, Artificial Sequence
  GATA2 Guide RNA
cgaggaagggggagugaggcgu

SEQ ID NO: 33770 - RNA, 22 nt, Artificial Sequence
  GATA2 Guide RNA
cgaggugucccgcacgccacgg

SEQ ID NO: 33771 - RNA, 22 nt, Artificial Sequence
  GATA2 Guide RNA
cgcacacucacguggugacccg

SEQ ID NO: 33772 - RNA, 22 nt, Artificial Sequence
  GATA2 Guide RNA
cgcagggccguugccgucugca

SEQ ID NO: 33773 - RNA, 22 nt, Artificial Sequence
  GATA2 Guide RNA
cgccacggagccccagcccaga

SEQ ID NO: 33774 - RNA, 22 nt, Artificial Sequence
  GATA2 Guide RNA
cgccagcgccugacacccccca

SEQ ID NO: 33775 - RNA, 22 nt, Artificial Sequence
  GATA2 Guide RNA
cgccggaucugggcuggggcuc

SEQ ID NO: 33776 - RNA, 22 nt, Artificial Sequence
  GATA2 Guide RNA
cgccucacucccccuuccucgc

SEQ ID NO: 33777 - RNA, 22 nt, Artificial Sequence
  GATA2 Guide RNA
cgccugacaccccccaaagucc

SEQ ID NO: 33778 - RNA, 22 nt, Artificial Sequence
  GATA2 Guide RNA
cgccuuccuuucguuuugagcc

SEQ ID NO: 33779 - RNA, 22 nt, Artificial Sequence
  GATA2 Guide RNA
cgcgaggaagggggagugaggc

SEQ ID NO: 33780 - RNA, 22 nt, Artificial Sequence
  GATA2 Guide RNA
cgcgcagggccguugccgucug

SEQ ID NO: 33781 - RNA, 22 nt, Artificial Sequence
  GATA2 Guide RNA
cgcgggucaccacgugagugug

SEQ ID NO: 33782 - RNA, 22 nt, Artificial Sequence
  GATA2 Guide RNA
cgcuggcggcacgccucacucc

SEQ ID NO: 33783 - RNA, 22 nt, Artificial Sequence
  GATA2 Guide RNA
cggagccccagcccagauccgg

SEQ ID NO: 33784 - RNA, 22 nt, Artificial Sequence
  GATA2 Guide RNA
cggaucugggcuggggcuccgu

SEQ ID NO: 33785 - RNA, 22 nt, Artificial Sequence
  GATA2 Guide RNA
cggcaacggcccugcgcgagga

SEQ ID NO: 33786 - RNA, 22 nt, Artificial Sequence
  GATA2 Guide RNA
cggcacgccucacucccccuuc

SEQ ID NO: 33787 - RNA, 22 nt, Artificial Sequence
  GATA2 Guide RNA
cggcgagaaagagcaccagucc

SEQ ID NO: 33788 - RNA, 22 nt, Artificial Sequence
  GATA2 Guide RNA
cggcggcucagggucugggugc

SEQ ID NO: 33789 - RNA, 22 nt, Artificial Sequence
  GATA2 Guide RNA
cggcucagggucugggugcaga

SEQ ID NO: 33790 - RNA, 22 nt, Artificial Sequence
  GATA2 Guide RNA
cgggacaccucguggugggacu

SEQ ID NO: 33791 - RNA, 22 nt, Artificial Sequence
  GATA2 Guide RNA
cgggacuggugcucuuucucgc

SEQ ID NO: 33792 - RNA, 22 nt, Artificial Sequence
  GATA2 Guide RNA
cgggggaggggguucagccacg

SEQ ID NO: 33793 - RNA, 22 nt, Artificial Sequence
  GATA2 Guide RNA
cgggucaccacgugagugugcg

SEQ ID NO: 33794 - RNA, 22 nt, Artificial Sequence
  GATA2 Guide RNA
cgggugggaggaaagcccaagg

SEQ ID NO: 33795 - RNA, 22 nt, Artificial Sequence
  GATA2 Guide RNA
cgucugcacccagacccugagc

SEQ ID NO: 33796 - RNA, 22 nt, Artificial Sequence
  GATA2 Guide RNA
cgugagugugcguggcugaacc

SEQ ID NO: 33797 - RNA, 22 nt, Artificial Sequence
  GATA2 Guide RNA
cgugccgccagcgccugacacc

SEQ ID NO: 33798 - RNA, 22 nt, Artificial Sequence
  GATA2 Guide RNA
cgugcgggacaccucguggugg

SEQ ID NO: 33799 - RNA, 22 nt, Artificial Sequence
  GATA2 Guide RNA
cguggcgugcgggacaccucgu

SEQ ID NO: 33800 - RNA, 22 nt, Artificial Sequence
  GATA2 Guide RNA
cguggcugaacccccucccccg

SEQ ID NO: 33801 - RNA, 22 nt, Artificial Sequence
  GATA2 Guide RNA
cguggugacccgcggcuccaga

SEQ ID NO: 33802 - RNA, 22 nt, Artificial Sequence
  GATA2 Guide RNA
cguggugggacuuuggggggug

SEQ ID NO: 33803 - RNA, 22 nt, Artificial Sequence
  GATA2 Guide RNA
cguugccgucugcacccagacc

SEQ ID NO: 33804 - RNA, 22 nt, Artificial Sequence
  GATA2 Guide RNA
cguuuugagccuugggcuuucc

SEQ ID NO: 33805 - RNA, 22 nt, Artificial Sequence
  GATA2 Guide RNA
cucaaaacgaaaggaaggcggg

SEQ ID NO: 33806 - RNA, 22 nt, Artificial Sequence
  GATA2 Guide RNA
cucacguggugacccgcggcuc

SEQ ID NO: 33807 - RNA, 22 nt, Artificial Sequence
  GATA2 Guide RNA
cucacucccccuuccucgcgca

SEQ ID NO: 33808 - RNA, 22 nt, Artificial Sequence
  GATA2 Guide RNA
cucagggucugggugcagacgg

SEQ ID NO: 33809 - RNA, 22 nt, Artificial Sequence
  GATA2 Guide RNA
cucccacccgggacuggugcuc

SEQ ID NO: 33810 - RNA, 22 nt, Artificial Sequence
  GATA2 Guide RNA
cucccccgccuuccuuucguuu

SEQ ID NO: 33811 - RNA, 22 nt, Artificial Sequence
  GATA2 Guide RNA
cuccguggcgugcgggacaccu

SEQ ID NO: 33812 - RNA, 22 nt, Artificial Sequence
  GATA2 Guide RNA
cucgccggaucugggcuggggc

SEQ ID NO: 33813 - RNA, 22 nt, Artificial Sequence
  GATA2 Guide RNA
cucgcgcagggccguugccguc

SEQ ID NO: 33814 - RNA, 22 nt, Artificial Sequence
  GATA2 Guide RNA
cucguggugggacuuugggggg

SEQ ID NO: 33815 - RNA, 22 nt, Artificial Sequence
  GATA2 Guide RNA
cucuuucucgccggaucugggc

SEQ ID NO: 33816 - RNA, 22 nt, Artificial Sequence
  GATA2 Guide RNA
cugaacccccucccccgccuuc

SEQ ID NO: 33817 - RNA, 22 nt, Artificial Sequence
  GATA2 Guide RNA
cugacaccccccaaagucccac

SEQ ID NO: 33818 - RNA, 22 nt, Artificial Sequence
  GATA2 Guide RNA
cugcacccagacccugagccgc

SEQ ID NO: 33819 - RNA, 22 nt, Artificial Sequence
  GATA2 Guide RNA
cugcgcgaggaagggggaguga

SEQ ID NO: 33820 - RNA, 22 nt, Artificial Sequence
  GATA2 Guide RNA
cuggagccgcgggucaccacgu

SEQ ID NO: 33821 - RNA, 22 nt, Artificial Sequence
  GATA2 Guide RNA
cuggcggcacgccucacucccc

SEQ ID NO: 33822 - RNA, 22 nt, Artificial Sequence
  GATA2 Guide RNA
cugggcuggggcuccguggcgu

SEQ ID NO: 33823 - RNA, 22 nt, Artificial Sequence
  GATA2 Guide RNA
cugggugcagacggcaacggcc

SEQ ID NO: 33824 - RNA, 22 nt, Artificial Sequence
  GATA2 Guide RNA
cuggugcucuuucucgccggau

SEQ ID NO: 33825 - RNA, 22 nt, Artificial Sequence
  GATA2 Guide RNA
cuuccucgcgcagggccguugc

SEQ ID NO: 33826 - RNA, 22 nt, Artificial Sequence
  GATA2 Guide RNA
cuuccuuucguuuugagccuug

SEQ ID NO: 33827 - RNA, 22 nt, Artificial Sequence
  GATA2 Guide RNA
cuugggcuuuccucccacccgg

SEQ ID NO: 33828 - RNA, 22 nt, Artificial Sequence
  GATA2 Guide RNA
cuuuccucccacccgggacugg

SEQ ID NO: 33829 - RNA, 22 nt, Artificial Sequence
  GATA2 Guide RNA
cuuucguuuugagccuugggcu

SEQ ID NO: 33830 - RNA, 22 nt, Artificial Sequence
  GATA2 Guide RNA
cuuucucgccggaucugggcug

SEQ ID NO: 33831 - RNA, 22 nt, Artificial Sequence
  GATA2 Guide RNA
cuuuggggggugucaggcgcug

SEQ ID NO: 33832 - RNA, 22 nt, Artificial Sequence
  GATA2 Guide RNA
gaaagagcaccagucccgggug

SEQ ID NO: 33833 - RNA, 22 nt, Artificial Sequence
  GATA2 Guide RNA
gaaagcccaaggcucaaaacga

SEQ ID NO: 33834 - RNA, 22 nt, Artificial Sequence
  GATA2 Guide RNA
gaaaggaaggcgggggaggggg

SEQ ID NO: 33835 - RNA, 22 nt, Artificial Sequence
  GATA2 Guide RNA
gaacccccucccccgccuuccu

SEQ ID NO: 33836 - RNA, 22 nt, Artificial Sequence
  GATA2 Guide RNA
gaaggcgggggaggggguucag

SEQ ID NO: 33837 - RNA, 22 nt, Artificial Sequence
  GATA2 Guide RNA
gaagggggagugaggcgugccg

SEQ ID NO: 33838 - RNA, 22 nt, Artificial Sequence
  GATA2 Guide RNA
gacaccccccaaagucccacca

SEQ ID NO: 33839 - RNA, 22 nt, Artificial Sequence
  GATA2 Guide RNA
gacaccucguggugggacuuug

SEQ ID NO: 33840 - RNA, 22 nt, Artificial Sequence
  GATA2 Guide RNA
gacccgcggcuccagaaucaca

SEQ ID NO: 33841 - RNA, 22 nt, Artificial Sequence
  GATA2 Guide RNA
gacggcaacggcccugcgcgag

SEQ ID NO: 33842 - RNA, 22 nt, Artificial Sequence
  GATA2 Guide RNA
gacuggugcucuuucucgccgg

SEQ ID NO: 33843 - RNA, 22 nt, Artificial Sequence
  GATA2 Guide RNA
gacuuuggggggugucaggcgc

SEQ ID NO: 33844 - RNA, 22 nt, Artificial Sequence
  GATA2 Guide RNA
gagaaagagcaccagucccggg

SEQ ID NO: 33845 - RNA, 22 nt, Artificial Sequence
  GATA2 Guide RNA
gagcaccagucccgggugggag

SEQ ID NO: 33846 - RNA, 22 nt, Artificial Sequence
  GATA2 Guide RNA
gagccccagcccagauccggcg

SEQ ID NO: 33847 - RNA, 22 nt, Artificial Sequence
  GATA2 Guide RNA
gagccgcgggucaccacgugag

SEQ ID NO: 33848 - RNA, 22 nt, Artificial Sequence
  GATA2 Guide RNA
gagccuugggcuuuccucccac

SEQ ID NO: 33849 - RNA, 22 nt, Artificial Sequence
  GATA2 Guide RNA
gaggaaagcccaaggcucaaaa

SEQ ID NO: 33850 - RNA, 22 nt, Artificial Sequence
  GATA2 Guide RNA
gaggaagggggagugaggcgug

SEQ ID NO: 33851 - RNA, 22 nt, Artificial Sequence
  GATA2 Guide RNA
gaggcgugccgccagcgccuga

SEQ ID NO: 33852 - RNA, 22 nt, Artificial Sequence
  GATA2 Guide RNA
gaggggguucagccacgcacac

SEQ ID NO: 33853 - RNA, 22 nt, Artificial Sequence
  GATA2 Guide RNA
gaggugucccgcacgccacgga

SEQ ID NO: 33854 - RNA, 22 nt, Artificial Sequence
  GATA2 Guide RNA
gagugaggcgugccgccagcgc

SEQ ID NO: 33855 - RNA, 22 nt, Artificial Sequence
  GATA2 Guide RNA
gagugugcguggcugaaccccc

SEQ ID NO: 33856 - RNA, 22 nt, Artificial Sequence
  GATA2 Guide RNA
gauccggcgagaaagagcacca

SEQ ID NO: 33857 - RNA, 22 nt, Artificial Sequence
  GATA2 Guide RNA
gaucugggcuggggcuccgugg

SEQ ID NO: 33858 - RNA, 22 nt, Artificial Sequence
  GATA2 Guide RNA
gauucuggagccgcgggucacc

SEQ ID NO: 33859 - RNA, 22 nt, Artificial Sequence
  GATA2 Guide RNA
gcaacggcccugcgcgaggaag

SEQ ID NO: 33860 - RNA, 22 nt, Artificial Sequence
  GATA2 Guide RNA
gcacacucacguggugacccgc

SEQ ID NO: 33861 - RNA, 22 nt, Artificial Sequence
  GATA2 Guide RNA
gcaccagucccgggugggagga

SEQ ID NO: 33862 - RNA, 22 nt, Artificial Sequence
  GATA2 Guide RNA
gcacccagacccugagccgccg

SEQ ID NO: 33863 - RNA, 22 nt, Artificial Sequence
  GATA2 Guide RNA
gcacgccucacucccccuuccu

SEQ ID NO: 33864 - RNA, 22 nt, Artificial Sequence
  GATA2 Guide RNA
gcagacggcaacggcccugcgc

SEQ ID NO: 33865 - RNA, 22 nt, Artificial Sequence
  GATA2 Guide RNA
gcagggccguugccgucugcac

SEQ ID NO: 33866 - RNA, 22 nt, Artificial Sequence
  GATA2 Guide RNA
gccacgcacacucacgugguga

SEQ ID NO: 33867 - RNA, 22 nt, Artificial Sequence
  GATA2 Guide RNA
gccacggagccccagcccagau

SEQ ID NO: 33868 - RNA, 22 nt, Artificial Sequence
  GATA2 Guide RNA
gccagcgccugacaccccccaa

SEQ ID NO: 33869 - RNA, 22 nt, Artificial Sequence
  GATA2 Guide RNA
gcccaaggcucaaaacgaaagg

SEQ ID NO: 33870 - RNA, 22 nt, Artificial Sequence
  GATA2 Guide RNA
gcccagauccggcgagaaagag

SEQ ID NO: 33871 - RNA, 22 nt, Artificial Sequence
  GATA2 Guide RNA
gccccagcccagauccggcgag

SEQ ID NO: 33872 - RNA, 22 nt, Artificial Sequence
  GATA2 Guide RNA
gcccugcgcgaggaagggggag

SEQ ID NO: 33873 - RNA, 22 nt, Artificial Sequence
  GATA2 Guide RNA
gccgcgggucaccacgugagug

SEQ ID NO: 33874 - RNA, 22 nt, Artificial Sequence
  GATA2 Guide RNA
gccggaucugggcuggggcucc

SEQ ID NO: 33875 - RNA, 22 nt, Artificial Sequence
  GATA2 Guide RNA
gccgucugcacccagacccuga

SEQ ID NO: 33876 - RNA, 22 nt, Artificial Sequence
  GATA2 Guide RNA
gccguugccgucugcacccaga

SEQ ID NO: 33877 - RNA, 22 nt, Artificial Sequence
  GATA2 Guide RNA
gccucacucccccuuccucgcg

SEQ ID NO: 33878 - RNA, 22 nt, Artificial Sequence
  GATA2 Guide RNA
gccugacaccccccaaaguccc

SEQ ID NO: 33879 - RNA, 22 nt, Artificial Sequence
  GATA2 Guide RNA
gccuuccuuucguuuugagccu

SEQ ID NO: 33880 - RNA, 22 nt, Artificial Sequence
  GATA2 Guide RNA
gccuugggcuuuccucccaccc

SEQ ID NO: 33881 - RNA, 22 nt, Artificial Sequence
  GATA2 Guide RNA
gcgagaaagagcaccagucccg

SEQ ID NO: 33882 - RNA, 22 nt, Artificial Sequence
  GATA2 Guide RNA
gcgaggaagggggagugaggcg

SEQ ID NO: 33883 - RNA, 22 nt, Artificial Sequence
  GATA2 Guide RNA
gcgcagggccguugccgucugc

SEQ ID NO: 33884 - RNA, 22 nt, Artificial Sequence
  GATA2 Guide RNA
gcgccugacaccccccaaaguc

SEQ ID NO: 33885 - RNA, 22 nt, Artificial Sequence
  GATA2 Guide RNA
gcgcgaggaagggggagugagg

SEQ ID NO: 33886 - RNA, 22 nt, Artificial Sequence
  GATA2 Guide RNA
gcgcuggcggcacgccucacuc

SEQ ID NO: 33887 - RNA, 22 nt, Artificial Sequence
  GATA2 Guide RNA
gcggcacgccucacucccccuu

SEQ ID NO: 33888 - RNA, 22 nt, Artificial Sequence
  GATA2 Guide RNA
gcggcggcucagggucugggug

SEQ ID NO: 33889 - RNA, 22 nt, Artificial Sequence
  GATA2 Guide RNA
gcggcucagggucugggugcag

SEQ ID NO: 33890 - RNA, 22 nt, Artificial Sequence
  GATA2 Guide RNA
gcgggacaccucguggugggac

SEQ ID NO: 33891 - RNA, 22 nt, Artificial Sequence
  GATA2 Guide RNA
gcgggggaggggguucagccac

SEQ ID NO: 33892 - RNA, 22 nt, Artificial Sequence
  GATA2 Guide RNA
gcgggucaccacgugagugugc

SEQ ID NO: 33893 - RNA, 22 nt, Artificial Sequence
  GATA2 Guide RNA
gcgugccgccagcgccugacac

SEQ ID NO: 33894 - RNA, 22 nt, Artificial Sequence
  GATA2 Guide RNA
gcgugcgggacaccucguggug

SEQ ID NO: 33895 - RNA, 22 nt, Artificial Sequence
  GATA2 Guide RNA
gcguggcugaacccccuccccc

SEQ ID NO: 33896 - RNA, 22 nt, Artificial Sequence
  GATA2 Guide RNA
gcucaaaacgaaaggaaggcgg

SEQ ID NO: 33897 - RNA, 22 nt, Artificial Sequence
  GATA2 Guide RNA
gcucagggucugggugcagacg

SEQ ID NO: 33898 - RNA, 22 nt, Artificial Sequence
  GATA2 Guide RNA
gcuccguggcgugcgggacacc

SEQ ID NO: 33899 - RNA, 22 nt, Artificial Sequence
  GATA2 Guide RNA
gcucuuucucgccggaucuggg

SEQ ID NO: 33900 - RNA, 22 nt, Artificial Sequence
  GATA2 Guide RNA
gcugaacccccucccccgccuu

SEQ ID NO: 33901 - RNA, 22 nt, Artificial Sequence
  GATA2 Guide RNA
gcuggcggcacgccucacuccc

SEQ ID NO: 33902 - RNA, 22 nt, Artificial Sequence
  GATA2 Guide RNA
gcuuuccucccacccgggacug

SEQ ID NO: 33903 - RNA, 22 nt, Artificial Sequence
  GATA2 Guide RNA
ggaaagcccaaggcucaaaacg

SEQ ID NO: 33904 - RNA, 22 nt, Artificial Sequence
  GATA2 Guide RNA
ggaaggcgggggaggggguuca

SEQ ID NO: 33905 - RNA, 22 nt, Artificial Sequence
  GATA2 Guide RNA
ggaagggggagugaggcgugcc

SEQ ID NO: 33906 - RNA, 22 nt, Artificial Sequence
  GATA2 Guide RNA
ggacaccucguggugggacuuu

SEQ ID NO: 33907 - RNA, 22 nt, Artificial Sequence
  GATA2 Guide RNA
ggacuggugcucuuucucgccg

SEQ ID NO: 33908 - RNA, 22 nt, Artificial Sequence
  GATA2 Guide RNA
ggacuuuggggggugucaggcg

SEQ ID NO: 33909 - RNA, 22 nt, Artificial Sequence
  GATA2 Guide RNA
ggagccccagcccagauccggc

SEQ ID NO: 33910 - RNA, 22 nt, Artificial Sequence
  GATA2 Guide RNA
ggagccgcgggucaccacguga

SEQ ID NO: 33911 - RNA, 22 nt, Artificial Sequence
  GATA2 Guide RNA
ggaggaaagcccaaggcucaaa

SEQ ID NO: 33912 - RNA, 22 nt, Artificial Sequence
  GATA2 Guide RNA
ggaggggguucagccacgcaca

SEQ ID NO: 33913 - RNA, 22 nt, Artificial Sequence
  GATA2 Guide RNA
ggagugaggcgugccgccagcg

SEQ ID NO: 33914 - RNA, 22 nt, Artificial Sequence
  GATA2 Guide RNA
ggaucugggcuggggcuccgug

SEQ ID NO: 33915 - RNA, 22 nt, Artificial Sequence
  GATA2 Guide RNA
ggcaacggcccugcgcgaggaa

SEQ ID NO: 33916 - RNA, 22 nt, Artificial Sequence
  GATA2 Guide RNA
ggcacgccucacucccccuucc

SEQ ID NO: 33917 - RNA, 22 nt, Artificial Sequence
  GATA2 Guide RNA
ggcccugcgcgaggaaggggga

SEQ ID NO: 33918 - RNA, 22 nt, Artificial Sequence
  GATA2 Guide RNA
ggccguugccgucugcacccag

SEQ ID NO: 33919 - RNA, 22 nt, Artificial Sequence
  GATA2 Guide RNA
ggcgagaaagagcaccaguccc

SEQ ID NO: 33920 - RNA, 22 nt, Artificial Sequence
  GATA2 Guide RNA
ggcgcuggcggcacgccucacu

SEQ ID NO: 33921 - RNA, 22 nt, Artificial Sequence
  GATA2 Guide RNA
ggcggcacgccucacucccccu

SEQ ID NO: 33922 - RNA, 22 nt, Artificial Sequence
  GATA2 Guide RNA
ggcggcggcucagggucugggu

SEQ ID NO: 33923 - RNA, 22 nt, Artificial Sequence
  GATA2 Guide RNA
ggcggcucagggucugggugca

SEQ ID NO: 33924 - RNA, 22 nt, Artificial Sequence
  GATA2 Guide RNA
ggcgggggaggggguucagcca

SEQ ID NO: 33925 - RNA, 22 nt, Artificial Sequence
  GATA2 Guide RNA
ggcgugccgccagcgccugaca

SEQ ID NO: 33926 - RNA, 22 nt, Artificial Sequence
  GATA2 Guide RNA
ggcgugcgggacaccucguggu

SEQ ID NO: 33927 - RNA, 22 nt, Artificial Sequence
  GATA2 Guide RNA
ggcucaaaacgaaaggaaggcg

SEQ ID NO: 33928 - RNA, 22 nt, Artificial Sequence
  GATA2 Guide RNA
ggcucagggucugggugcagac

SEQ ID NO: 33929 - RNA, 22 nt, Artificial Sequence
  GATA2 Guide RNA
ggcuccguggcgugcgggacac

SEQ ID NO: 33930 - RNA, 22 nt, Artificial Sequence
  GATA2 Guide RNA
ggcugaacccccucccccgccu

SEQ ID NO: 33931 - RNA, 22 nt, Artificial Sequence
  GATA2 Guide RNA
ggcuuuccucccacccgggacu

SEQ ID NO: 33932 - RNA, 22 nt, Artificial Sequence
  GATA2 Guide RNA
gggacaccucguggugggacuu

SEQ ID NO: 33933 - RNA, 22 nt, Artificial Sequence
  GATA2 Guide RNA
gggacuggugcucuuucucgcc

SEQ ID NO: 33934 - RNA, 22 nt, Artificial Sequence
  GATA2 Guide RNA
gggacuuuggggggugucaggc

SEQ ID NO: 33935 - RNA, 22 nt, Artificial Sequence
  GATA2 Guide RNA
gggaggaaagcccaaggcucaa

SEQ ID NO: 33936 - RNA, 22 nt, Artificial Sequence
  GATA2 Guide RNA
gggaggggguucagccacgcac

SEQ ID NO: 33937 - RNA, 22 nt, Artificial Sequence
  GATA2 Guide RNA
gggagugaggcgugccgccagc

SEQ ID NO: 33938 - RNA, 22 nt, Artificial Sequence
  GATA2 Guide RNA
gggccguugccgucugcaccca

SEQ ID NO: 33939 - RNA, 22 nt, Artificial Sequence
  GATA2 Guide RNA
gggcuccguggcgugcgggaca

SEQ ID NO: 33940 - RNA, 22 nt, Artificial Sequence
  GATA2 Guide RNA
gggcuuuccucccacccgggac

SEQ ID NO: 33941 - RNA, 22 nt, Artificial Sequence
  GATA2 Guide RNA
ggggaggggguucagccacgca

SEQ ID NO: 33942 - RNA, 22 nt, Artificial Sequence
  GATA2 Guide RNA
ggggagugaggcgugccgccag

SEQ ID NO: 33943 - RNA, 22 nt, Artificial Sequence
  GATA2 Guide RNA
gggggaggggguucagccacgc

SEQ ID NO: 33944 - RNA, 22 nt, Artificial Sequence
  GATA2 Guide RNA
gggggagugaggcgugccgcca

SEQ ID NO: 33945 - RNA, 22 nt, Artificial Sequence
  GATA2 Guide RNA
ggggguucagccacgcacacuc

SEQ ID NO: 33946 - RNA, 22 nt, Artificial Sequence
  GATA2 Guide RNA
ggggugucaggcgcuggcggca

SEQ ID NO: 33947 - RNA, 22 nt, Artificial Sequence
  GATA2 Guide RNA
gggguucagccacgcacacuca

SEQ ID NO: 33948 - RNA, 22 nt, Artificial Sequence
  GATA2 Guide RNA
gggucaccacgugagugugcgu

SEQ ID NO: 33949 - RNA, 22 nt, Artificial Sequence
  GATA2 Guide RNA
gggugcagacggcaacggcccu

SEQ ID NO: 33950 - RNA, 22 nt, Artificial Sequence
  GATA2 Guide RNA
gggugggaggaaagcccaaggc

SEQ ID NO: 33951 - RNA, 22 nt, Artificial Sequence
  GATA2 Guide RNA
gggugucaggcgcuggcggcac

SEQ ID NO: 33952 - RNA, 22 nt, Artificial Sequence
  GATA2 Guide RNA
ggguucagccacgcacacucac

SEQ ID NO: 33953 - RNA, 22 nt, Artificial Sequence
  GATA2 Guide RNA
ggucaccacgugagugugcgug

SEQ ID NO: 33954 - RNA, 22 nt, Artificial Sequence
  GATA2 Guide RNA
ggucugggugcagacggcaacg

SEQ ID NO: 33955 - RNA, 22 nt, Artificial Sequence
  GATA2 Guide RNA
ggugacccgcggcuccagaauc

SEQ ID NO: 33956 - RNA, 22 nt, Artificial Sequence
  GATA2 Guide RNA
ggugcagacggcaacggcccug

SEQ ID NO: 33957 - RNA, 22 nt, Artificial Sequence
  GATA2 Guide RNA
ggugcucuuucucgccggaucu

SEQ ID NO: 33958 - RNA, 22 nt, Artificial Sequence
  GATA2 Guide RNA
ggugggacuuugggggguguca

SEQ ID NO: 33959 - RNA, 22 nt, Artificial Sequence
  GATA2 Guide RNA
ggugggaggaaagcccaaggcu

SEQ ID NO: 33960 - RNA, 22 nt, Artificial Sequence
  GATA2 Guide RNA
ggugucaggcgcuggcggcacg

SEQ ID NO: 33961 - RNA, 22 nt, Artificial Sequence
  GATA2 Guide RNA
ggugucccgcacgccacggagc

SEQ ID NO: 33962 - RNA, 22 nt, Artificial Sequence
  GATA2 Guide RNA
ggugugugauucuggagccgcg

SEQ ID NO: 33963 - RNA, 22 nt, Artificial Sequence
  GATA2 Guide RNA
gguucagccacgcacacucacg

SEQ ID NO: 33964 - RNA, 22 nt, Artificial Sequence
  GATA2 Guide RNA
gucaccacgugagugugcgugg

SEQ ID NO: 33965 - RNA, 22 nt, Artificial Sequence
  GATA2 Guide RNA
gucaggcgcuggcggcacgccu

SEQ ID NO: 33966 - RNA, 22 nt, Artificial Sequence
  GATA2 Guide RNA
gucccaccacgaggugucccgc

SEQ ID NO: 33967 - RNA, 22 nt, Artificial Sequence
  GATA2 Guide RNA
gucccgggugggaggaaagccc

SEQ ID NO: 33968 - RNA, 22 nt, Artificial Sequence
  GATA2 Guide RNA
gucugcacccagacccugagcc

SEQ ID NO: 33969 - RNA, 22 nt, Artificial Sequence
  GATA2 Guide RNA
gucugggugcagacggcaacgg

SEQ ID NO: 33970 - RNA, 22 nt, Artificial Sequence
  GATA2 Guide RNA
gugacccgcggcuccagaauca

SEQ ID NO: 33971 - RNA, 22 nt, Artificial Sequence
  GATA2 Guide RNA
gugaggcgugccgccagcgccu

SEQ ID NO: 33972 - RNA, 22 nt, Artificial Sequence
  GATA2 Guide RNA
gugagugugcguggcugaaccc

SEQ ID NO: 33973 - RNA, 22 nt, Artificial Sequence
  GATA2 Guide RNA
gugauucuggagccgcggguca

SEQ ID NO: 33974 - RNA, 22 nt, Artificial Sequence
  GATA2 Guide RNA
gugcagacggcaacggcccugc

SEQ ID NO: 33975 - RNA, 22 nt, Artificial Sequence
  GATA2 Guide RNA
gugccgccagcgccugacaccc

SEQ ID NO: 33976 - RNA, 22 nt, Artificial Sequence
  GATA2 Guide RNA
gugcgggacaccucgugguggg

SEQ ID NO: 33977 - RNA, 22 nt, Artificial Sequence
  GATA2 Guide RNA
gugcguggcugaacccccuccc

SEQ ID NO: 33978 - RNA, 22 nt, Artificial Sequence
  GATA2 Guide RNA
gugcucuuucucgccggaucug

SEQ ID NO: 33979 - RNA, 22 nt, Artificial Sequence
  GATA2 Guide RNA
guggcgugcgggacaccucgug

SEQ ID NO: 33980 - RNA, 22 nt, Artificial Sequence
  GATA2 Guide RNA
guggcugaacccccucccccgc

SEQ ID NO: 33981 - RNA, 22 nt, Artificial Sequence
  GATA2 Guide RNA
gugggacuuuggggggugucag

SEQ ID NO: 33982 - RNA, 22 nt, Artificial Sequence
  GATA2 Guide RNA
gugggaggaaagcccaaggcuc

SEQ ID NO: 33983 - RNA, 22 nt, Artificial Sequence
  GATA2 Guide RNA
guggugacccgcggcuccagaa

SEQ ID NO: 33984 - RNA, 22 nt, Artificial Sequence
  GATA2 Guide RNA
guggugggacuuuggggggugu

SEQ ID NO: 33985 - RNA, 22 nt, Artificial Sequence
  GATA2 Guide RNA
gugucaggcgcuggcggcacgc

SEQ ID NO: 33986 - RNA, 22 nt, Artificial Sequence
  GATA2 Guide RNA
gugucccgcacgccacggagcc

SEQ ID NO: 33987 - RNA, 22 nt, Artificial Sequence
  GATA2 Guide RNA
gugugauucuggagccgcgggu

SEQ ID NO: 33988 - RNA, 22 nt, Artificial Sequence
  GATA2 Guide RNA
gugugcguggcugaacccccuc

SEQ ID NO: 33989 - RNA, 22 nt, Artificial Sequence
  GATA2 Guide RNA
gugugugauucuggagccgcgg

SEQ ID NO: 33990 - RNA, 22 nt, Artificial Sequence
  GATA2 Guide RNA
guucagccacgcacacucacgu

SEQ ID NO: 33991 - RNA, 22 nt, Artificial Sequence
  GATA2 Guide RNA
guugccgucugcacccagaccc

SEQ ID NO: 33992 - RNA, 22 nt, Artificial Sequence
  GATA2 Guide RNA
guuuugagccuugggcuuuccu

SEQ ID NO: 33993 - RNA, 22 nt, Artificial Sequence
  GATA2 Guide RNA
ucaaaacgaaaggaaggcgggg

SEQ ID NO: 33994 - RNA, 22 nt, Artificial Sequence
  GATA2 Guide RNA
ucaccacgugagugugcguggc

SEQ ID NO: 33995 - RNA, 22 nt, Artificial Sequence
  GATA2 Guide RNA
ucacguggugacccgcggcucc

SEQ ID NO: 33996 - RNA, 22 nt, Artificial Sequence
  GATA2 Guide RNA
ucagccacgcacacucacgugg

SEQ ID NO: 33997 - RNA, 22 nt, Artificial Sequence
  GATA2 Guide RNA
ucaggcgcuggcggcacgccuc

SEQ ID NO: 33998 - RNA, 22 nt, Artificial Sequence
  GATA2 Guide RNA
ucagggucugggugcagacggc

SEQ ID NO: 33999 - RNA, 22 nt, Artificial Sequence
  GATA2 Guide RNA
ucccaccacgaggugucccgca

SEQ ID NO: 34000 - RNA, 22 nt, Artificial Sequence
  GATA2 Guide RNA
ucccacccgggacuggugcucu

SEQ ID NO: 34001 - RNA, 22 nt, Artificial Sequence
  GATA2 Guide RNA
ucccccgccuuccuuucguuuu

SEQ ID NO: 34002 - RNA, 22 nt, Artificial Sequence
  GATA2 Guide RNA
ucccccuuccucgcgcagggcc

SEQ ID NO: 34003 - RNA, 22 nt, Artificial Sequence
  GATA2 Guide RNA
ucccgcacgccacggagcccca

SEQ ID NO: 34004 - RNA, 22 nt, Artificial Sequence
  GATA2 Guide RNA
ucccgggugggaggaaagccca

SEQ ID NO: 34005 - RNA, 22 nt, Artificial Sequence
  GATA2 Guide RNA
uccggcgagaaagagcaccagu

SEQ ID NO: 34006 - RNA, 22 nt, Artificial Sequence
  GATA2 Guide RNA
uccguggcgugcgggacaccuc

SEQ ID NO: 34007 - RNA, 22 nt, Artificial Sequence
  GATA2 Guide RNA
uccucccacccgggacuggugc

SEQ ID NO: 34008 - RNA, 22 nt, Artificial Sequence
  GATA2 Guide RNA
uccucgcgcagggccguugccg

SEQ ID NO: 34009 - RNA, 22 nt, Artificial Sequence
  GATA2 Guide RNA
uccuuucguuuugagccuuggg

SEQ ID NO: 34010 - RNA, 22 nt, Artificial Sequence
  GATA2 Guide RNA
ucgccggaucugggcuggggcu

SEQ ID NO: 34011 - RNA, 22 nt, Artificial Sequence
  GATA2 Guide RNA
ucgcgcagggccguugccgucu

SEQ ID NO: 34012 - RNA, 22 nt, Artificial Sequence
  GATA2 Guide RNA
ucguggugggacuuuggggggu

SEQ ID NO: 34013 - RNA, 22 nt, Artificial Sequence
  GATA2 Guide RNA
ucguuuugagccuugggcuuuc

SEQ ID NO: 34014 - RNA, 22 nt, Artificial Sequence
  GATA2 Guide RNA
ucucgccggaucugggcugggg

SEQ ID NO: 34015 - RNA, 22 nt, Artificial Sequence
  GATA2 Guide RNA
ucugcacccagacccugagccg

SEQ ID NO: 34016 - RNA, 22 nt, Artificial Sequence
  GATA2 Guide RNA
ucuggagccgcgggucaccacg

SEQ ID NO: 34017 - RNA, 22 nt, Artificial Sequence
  GATA2 Guide RNA
ucugggcuggggcuccguggcg

SEQ ID NO: 34018 - RNA, 22 nt, Artificial Sequence
  GATA2 Guide RNA
ucugggugcagacggcaacggc

SEQ ID NO: 34019 - RNA, 22 nt, Artificial Sequence
  GATA2 Guide RNA
ucuuucucgccggaucugggcu

SEQ ID NO: 34020 - RNA, 22 nt, Artificial Sequence
  GATA2 Guide RNA
ugaacccccucccccgccuucc

SEQ ID NO: 34021 - RNA, 22 nt, Artificial Sequence
  GATA2 Guide RNA
ugacaccccccaaagucccacc

SEQ ID NO: 34022 - RNA, 22 nt, Artificial Sequence
  GATA2 Guide RNA
ugacccgcggcuccagaaucac

SEQ ID NO: 34023 - RNA, 22 nt, Artificial Sequence
  GATA2 Guide RNA
ugagccuugggcuuuccuccca

SEQ ID NO: 34024 - RNA, 22 nt, Artificial Sequence
  GATA2 Guide RNA
ugaggcgugccgccagcgccug

SEQ ID NO: 34025 - RNA, 22 nt, Artificial Sequence
  GATA2 Guide RNA
ugagugugcguggcugaacccc

SEQ ID NO: 34026 - RNA, 22 nt, Artificial Sequence
  GATA2 Guide RNA
ugauucuggagccgcgggucac

SEQ ID NO: 34027 - RNA, 22 nt, Artificial Sequence
  GATA2 Guide RNA
ugcacccagacccugagccgcc

SEQ ID NO: 34028 - RNA, 22 nt, Artificial Sequence
  GATA2 Guide RNA
ugcagacggcaacggcccugcg

SEQ ID NO: 34029 - RNA, 22 nt, Artificial Sequence
  GATA2 Guide RNA
ugccgccagcgccugacacccc

SEQ ID NO: 34030 - RNA, 22 nt, Artificial Sequence
  GATA2 Guide RNA
ugccgucugcacccagacccug

SEQ ID NO: 34031 - RNA, 22 nt, Artificial Sequence
  GATA2 Guide RNA
ugcgcgaggaagggggagugag

SEQ ID NO: 34032 - RNA, 22 nt, Artificial Sequence
  GATA2 Guide RNA
ugcgggacaccucgugguggga

SEQ ID NO: 34033 - RNA, 22 nt, Artificial Sequence
  GATA2 Guide RNA
ugcguggcugaacccccucccc

SEQ ID NO: 34034 - RNA, 22 nt, Artificial Sequence
  GATA2 Guide RNA
ugcucuuucucgccggaucugg

SEQ ID NO: 34035 - RNA, 22 nt, Artificial Sequence
  GATA2 Guide RNA
uggagccgcgggucaccacgug

SEQ ID NO: 34036 - RNA, 22 nt, Artificial Sequence
  GATA2 Guide RNA
uggcggcacgccucacuccccc

SEQ ID NO: 34037 - RNA, 22 nt, Artificial Sequence
  GATA2 Guide RNA
uggcgugcgggacaccucgugg

SEQ ID NO: 34038 - RNA, 22 nt, Artificial Sequence
  GATA2 Guide RNA
uggcugaacccccucccccgcc

SEQ ID NO: 34039 - RNA, 22 nt, Artificial Sequence
  GATA2 Guide RNA
ugggacuuuggggggugucagg

SEQ ID NO: 34040 - RNA, 22 nt, Artificial Sequence
  GATA2 Guide RNA
ugggaggaaagcccaaggcuca

SEQ ID NO: 34041 - RNA, 22 nt, Artificial Sequence
  GATA2 Guide RNA
ugggcuggggcuccguggcgug

SEQ ID NO: 34042 - RNA, 22 nt, Artificial Sequence
  GATA2 Guide RNA
ugggcuuuccucccacccggga

SEQ ID NO: 34043 - RNA, 22 nt, Artificial Sequence
  GATA2 Guide RNA
uggggcuccguggcgugcggga

SEQ ID NO: 34044 - RNA, 22 nt, Artificial Sequence
  GATA2 Guide RNA
uggggggugucaggcgcuggcg

SEQ ID NO: 34045 - RNA, 22 nt, Artificial Sequence
  GATA2 Guide RNA
ugggugcagacggcaacggccc

SEQ ID NO: 34046 - RNA, 22 nt, Artificial Sequence
  GATA2 Guide RNA
uggugacccgcggcuccagaau

SEQ ID NO: 34047 - RNA, 22 nt, Artificial Sequence
  GATA2 Guide RNA
uggugcucuuucucgccggauc

SEQ ID NO: 34048 - RNA, 22 nt, Artificial Sequence
  GATA2 Guide RNA
uggugggacuuugggggguguc

SEQ ID NO: 34049 - RNA, 22 nt, Artificial Sequence
  GATA2 Guide RNA
ugucaggcgcuggcggcacgcc

SEQ ID NO: 34050 - RNA, 22 nt, Artificial Sequence
  GATA2 Guide RNA
ugucccgcacgccacggagccc

SEQ ID NO: 34051 - RNA, 22 nt, Artificial Sequence
  GATA2 Guide RNA
ugugauucuggagccgcggguc

SEQ ID NO: 34052 - RNA, 22 nt, Artificial Sequence
  GATA2 Guide RNA
ugugcguggcugaacccccucc

SEQ ID NO: 34053 - RNA, 22 nt, Artificial Sequence
  GATA2 Guide RNA
ugugugauucuggagccgcggg

SEQ ID NO: 34054 - RNA, 22 nt, Artificial Sequence
  GATA2 Guide RNA
uucagccacgcacacucacgug

SEQ ID NO: 34055 - RNA, 22 nt, Artificial Sequence
  GATA2 Guide RNA
uuccucccacccgggacuggug

SEQ ID NO: 34056 - RNA, 22 nt, Artificial Sequence
  GATA2 Guide RNA
uuccucgcgcagggccguugcc

SEQ ID NO: 34057 - RNA, 22 nt, Artificial Sequence
  GATA2 Guide RNA
uuccuuucguuuugagccuugg

SEQ ID NO: 34058 - RNA, 22 nt, Artificial Sequence
  GATA2 Guide RNA
uucguuuugagccuugggcuuu

SEQ ID NO: 34059 - RNA, 22 nt, Artificial Sequence
  GATA2 Guide RNA
uucucgccggaucugggcuggg

SEQ ID NO: 34060 - RNA, 22 nt, Artificial Sequence
  GATA2 Guide RNA
uucuggagccgcgggucaccac

SEQ ID NO: 34061 - RNA, 22 nt, Artificial Sequence
  GATA2 Guide RNA
uugagccuugggcuuuccuccc

SEQ ID NO: 34062 - RNA, 22 nt, Artificial Sequence
  GATA2 Guide RNA
uugccgucugcacccagacccu

SEQ ID NO: 34063 - RNA, 22 nt, Artificial Sequence
  GATA2 Guide RNA
uugggcuuuccucccacccggg

SEQ ID NO: 34064 - RNA, 22 nt, Artificial Sequence
  GATA2 Guide RNA
uuggggggugucaggcgcuggc

SEQ ID NO: 34065 - RNA, 22 nt, Artificial Sequence
  GATA2 Guide RNA
uuuccucccacccgggacuggu

SEQ ID NO: 34066 - RNA, 22 nt, Artificial Sequence
  GATA2 Guide RNA
uuucguuuugagccuugggcuu

SEQ ID NO: 34067 - RNA, 22 nt, Artificial Sequence
  GATA2 Guide RNA
uuucucgccggaucugggcugg

SEQ ID NO: 34068 - RNA, 22 nt, Artificial Sequence
  GATA2 Guide RNA
uuugagccuugggcuuuccucc

SEQ ID NO: 34069 - RNA, 22 nt, Artificial Sequence
  GATA2 Guide RNA
uuuggggggugucaggcgcugg

SEQ ID NO: 34070 - RNA, 22 nt, Artificial Sequence
  GATA2 Guide RNA
uuuugagccuugggcuuuccuc

SEQ ID NO: 34071 - RNA, 20 nt, Artificial Sequence
  GATA2 Guide RNA
aaacauaauaccccaccggu

SEQ ID NO: 34072 - RNA, 20 nt, Artificial Sequence
  GATA2 Guide RNA
aaacccugugggucccagac

SEQ ID NO: 34073 - RNA, 20 nt, Artificial Sequence
  GATA2 Guide RNA
aaagaaagccagaaacauaa

SEQ ID NO: 34074 - RNA, 20 nt, Artificial Sequence
  GATA2 Guide RNA
aaagagagagaggaucaggg

SEQ ID NO: 34075 - RNA, 20 nt, Artificial Sequence
  GATA2 Guide RNA
aaagaucaggguaggcagag

SEQ ID NO: 34076 - RNA, 20 nt, Artificial Sequence
  GATA2 Guide RNA
aaagccagaaacauaauacc

SEQ ID NO: 34077 - RNA, 20 nt, Artificial Sequence
  GATA2 Guide RNA
aacauaauaccccaccggua

SEQ ID NO: 34078 - RNA, 20 nt, Artificial Sequence
  GATA2 Guide RNA
aaccagcagucauccccucc

SEQ ID NO: 34079 - RNA, 20 nt, Artificial Sequence
  GATA2 Guide RNA
aaccccaccggacagacccu

SEQ ID NO: 34080 - RNA, 20 nt, Artificial Sequence
  GATA2 Guide RNA
aacccucacaggccagcugg

SEQ ID NO: 34081 - RNA, 20 nt, Artificial Sequence
  GATA2 Guide RNA
aacccugugggucccagacc

SEQ ID NO: 34082 - RNA, 20 nt, Artificial Sequence
  GATA2 Guide RNA
aagaaagccagaaacauaau

SEQ ID NO: 34083 - RNA, 20 nt, Artificial Sequence
  GATA2 Guide RNA
aagagagagaggaucagggu

SEQ ID NO: 34084 - RNA, 20 nt, Artificial Sequence
  GATA2 Guide RNA
aagaucaggguaggcagagc

SEQ ID NO: 34085 - RNA, 20 nt, Artificial Sequence
  GATA2 Guide RNA
aagccagaaacauaauaccc

SEQ ID NO: 34086 - RNA, 20 nt, Artificial Sequence
  GATA2 Guide RNA
aagcugaaggacaaguggca

SEQ ID NO: 34087 - RNA, 20 nt, Artificial Sequence
  GATA2 Guide RNA
aaggaaccccaccggacaga

SEQ ID NO: 34088 - RNA, 20 nt, Artificial Sequence
  GATA2 Guide RNA
aaggacaaguggcauagaag

SEQ ID NO: 34089 - RNA, 20 nt, Artificial Sequence
  GATA2 Guide RNA
aaguggcauagaaggaaccc

SEQ ID NO: 34090 - RNA, 20 nt, Artificial Sequence
  GATA2 Guide RNA
aagugggcagaaacccugug

SEQ ID NO: 34091 - RNA, 20 nt, Artificial Sequence
  GATA2 Guide RNA
aauaaucaggaaugucaguc

SEQ ID NO: 34092 - RNA, 20 nt, Artificial Sequence
  GATA2 Guide RNA
aauaccccaccgguaauaau

SEQ ID NO: 34093 - RNA, 20 nt, Artificial Sequence
  GATA2 Guide RNA
aaucaggaaugucaguccaa

SEQ ID NO: 34094 - RNA, 20 nt, Artificial Sequence
  GATA2 Guide RNA
aaucggccgcugcucccacc

SEQ ID NO: 34095 - RNA, 20 nt, Artificial Sequence
  GATA2 Guide RNA
aaugucaguccaagcugaag

SEQ ID NO: 34096 - RNA, 20 nt, Artificial Sequence
  GATA2 Guide RNA
aaugucugucaggggcgucc

SEQ ID NO: 34097 - RNA, 20 nt, Artificial Sequence
  GATA2 Guide RNA
acaaguggcauagaaggaac

SEQ ID NO: 34098 - RNA, 20 nt, Artificial Sequence
  GATA2 Guide RNA
acagacauugagaucacgac

SEQ ID NO: 34099 - RNA, 20 nt, Artificial Sequence
  GATA2 Guide RNA
acagacccuacagggaaccc

SEQ ID NO: 34100 - RNA, 20 nt, Artificial Sequence
  GATA2 Guide RNA
acaggccagcuggaaguggg

SEQ ID NO: 34101 - RNA, 20 nt, Artificial Sequence
  GATA2 Guide RNA
acagggaacccucacaggcc

SEQ ID NO: 34102 - RNA, 20 nt, Artificial Sequence
  GATA2 Guide RNA
acaggguuucugcccacuuc

SEQ ID NO: 34103 - RNA, 20 nt, Artificial Sequence
  GATA2 Guide RNA
acauaauaccccaccgguaa

SEQ ID NO: 34104 - RNA, 20 nt, Artificial Sequence
  GATA2 Guide RNA
acauuccugauuauuaccgg

SEQ ID NO: 34105 - RNA, 20 nt, Artificial Sequence
  GATA2 Guide RNA
acauugagaucacgacuccc

SEQ ID NO: 34106 - RNA, 20 nt, Artificial Sequence
  GATA2 Guide RNA
accagcagucauccccuccc

SEQ ID NO: 34107 - RNA, 20 nt, Artificial Sequence
  GATA2 Guide RNA
acccacaggguuucugccca

SEQ ID NO: 34108 - RNA, 20 nt, Artificial Sequence
  GATA2 Guide RNA
accccaccggacagacccua

SEQ ID NO: 34109 - RNA, 20 nt, Artificial Sequence
  GATA2 Guide RNA
accccaccgguaauaaucag

SEQ ID NO: 34110 - RNA, 20 nt, Artificial Sequence
  GATA2 Guide RNA
acccuacagggaacccucac

SEQ ID NO: 34111 - RNA, 20 nt, Artificial Sequence
  GATA2 Guide RNA
acccucacaggccagcugga

SEQ ID NO: 34112 - RNA, 20 nt, Artificial Sequence
  GATA2 Guide RNA
acccuccccaaucggccgcu

SEQ ID NO: 34113 - RNA, 20 nt, Artificial Sequence
  GATA2 Guide RNA
acccugauccucucucucuu

SEQ ID NO: 34114 - RNA, 20 nt, Artificial Sequence
  GATA2 Guide RNA
acccugaucuuucugcccac

SEQ ID NO: 34115 - RNA, 20 nt, Artificial Sequence
  GATA2 Guide RNA
acccugugggucccagaccc

SEQ ID NO: 34116 - RNA, 20 nt, Artificial Sequence
  GATA2 Guide RNA
accggacagacccuacaggg

SEQ ID NO: 34117 - RNA, 20 nt, Artificial Sequence
  GATA2 Guide RNA
accgguaauaaucaggaaug

SEQ ID NO: 34118 - RNA, 20 nt, Artificial Sequence
  GATA2 Guide RNA
accggugggguauuauguuu

SEQ ID NO: 34119 - RNA, 20 nt, Artificial Sequence
  GATA2 Guide RNA
acgacucccagaaccagcag

SEQ ID NO: 34120 - RNA, 20 nt, Artificial Sequence
  GATA2 Guide RNA
acgccccugacagacauuga

SEQ ID NO: 34121 - RNA, 20 nt, Artificial Sequence
  GATA2 Guide RNA
acucccagaaccagcaguca

SEQ ID NO: 34122 - RNA, 20 nt, Artificial Sequence
  GATA2 Guide RNA
acugacauuccugauuauua

SEQ ID NO: 34123 - RNA, 20 nt, Artificial Sequence
  GATA2 Guide RNA
acugcugguucugggagucg

SEQ ID NO: 34124 - RNA, 20 nt, Artificial Sequence
  GATA2 Guide RNA
acuuccagcuggccugugag

SEQ ID NO: 34125 - RNA, 20 nt, Artificial Sequence
  GATA2 Guide RNA
acuuguccuucagcuuggac

SEQ ID NO: 34126 - RNA, 20 nt, Artificial Sequence
  GATA2 Guide RNA
agaaacauaauaccccaccg

SEQ ID NO: 34127 - RNA, 20 nt, Artificial Sequence
  GATA2 Guide RNA
agaaacccugugggucccag

SEQ ID NO: 34128 - RNA, 20 nt, Artificial Sequence
  GATA2 Guide RNA
agaaagaucaggguaggcag

SEQ ID NO: 34129 - RNA, 20 nt, Artificial Sequence
  GATA2 Guide RNA
agaaagccagaaacauaaua

SEQ ID NO: 34130 - RNA, 20 nt, Artificial Sequence
  GATA2 Guide RNA
agaaccagcagucauccccu

SEQ ID NO: 34131 - RNA, 20 nt, Artificial Sequence
  GATA2 Guide RNA
agaaggaaccccaccggaca

SEQ ID NO: 34132 - RNA, 20 nt, Artificial Sequence
  GATA2 Guide RNA
agacauugagaucacgacuc

SEQ ID NO: 34133 - RNA, 20 nt, Artificial Sequence
  GATA2 Guide RNA
agacccuacagggaacccuc

SEQ ID NO: 34134 - RNA, 20 nt, Artificial Sequence
  GATA2 Guide RNA
agacccuccccaaucggccg

SEQ ID NO: 34135 - RNA, 20 nt, Artificial Sequence
  GATA2 Guide RNA
agagagagaggaucagggug

SEQ ID NO: 34136 - RNA, 20 nt, Artificial Sequence
  GATA2 Guide RNA
agagagaggaucaggguggg

SEQ ID NO: 34137 - RNA, 20 nt, Artificial Sequence
  GATA2 Guide RNA
agagaggaucagggugggca

SEQ ID NO: 34138 - RNA, 20 nt, Artificial Sequence
  GATA2 Guide RNA
agagcuagggacgccccuga

SEQ ID NO: 34139 - RNA, 20 nt, Artificial Sequence
  GATA2 Guide RNA
agaggaucagggugggcaga

SEQ ID NO: 34140 - RNA, 20 nt, Artificial Sequence
  GATA2 Guide RNA
agaggugggagcagcggccg

SEQ ID NO: 34141 - RNA, 20 nt, Artificial Sequence
  GATA2 Guide RNA
agaucacgacucccagaacc

SEQ ID NO: 34142 - RNA, 20 nt, Artificial Sequence
  GATA2 Guide RNA
agaucaggguaggcagagcu

SEQ ID NO: 34143 - RNA, 20 nt, Artificial Sequence
  GATA2 Guide RNA
agcagcggccgauuggggag

SEQ ID NO: 34144 - RNA, 20 nt, Artificial Sequence
  GATA2 Guide RNA
agcagucauccccuccccaa

SEQ ID NO: 34145 - RNA, 20 nt, Artificial Sequence
  GATA2 Guide RNA
agccagaaacauaauacccc

SEQ ID NO: 34146 - RNA, 20 nt, Artificial Sequence
  GATA2 Guide RNA
agcggccgauuggggagggu

SEQ ID NO: 34147 - RNA, 20 nt, Artificial Sequence
  GATA2 Guide RNA
agcuagggacgccccugaca

SEQ ID NO: 34148 - RNA, 20 nt, Artificial Sequence
  GATA2 Guide RNA
agcucugccuacccugaucu

SEQ ID NO: 34149 - RNA, 20 nt, Artificial Sequence
  GATA2 Guide RNA
agcugaaggacaaguggcau

SEQ ID NO: 34150 - RNA, 20 nt, Artificial Sequence
  GATA2 Guide RNA
agcuggaagugggcagaaac

SEQ ID NO: 34151 - RNA, 20 nt, Artificial Sequence
  GATA2 Guide RNA
agcuggccugugaggguucc

SEQ ID NO: 34152 - RNA, 20 nt, Artificial Sequence
  GATA2 Guide RNA
agcuuggacugacauuccug

SEQ ID NO: 34153 - RNA, 20 nt, Artificial Sequence
  GATA2 Guide RNA
aggaaccccaccggacagac

SEQ ID NO: 34154 - RNA, 20 nt, Artificial Sequence
  GATA2 Guide RNA
aggaaugucaguccaagcug

SEQ ID NO: 34155 - RNA, 20 nt, Artificial Sequence
  GATA2 Guide RNA
aggacaaguggcauagaagg

SEQ ID NO: 34156 - RNA, 20 nt, Artificial Sequence
  GATA2 Guide RNA
aggaucagggugggcagaaa

SEQ ID NO: 34157 - RNA, 20 nt, Artificial Sequence
  GATA2 Guide RNA
aggcagagcuagggacgccc

SEQ ID NO: 34158 - RNA, 20 nt, Artificial Sequence
  GATA2 Guide RNA
aggccagcuggaagugggca

SEQ ID NO: 34159 - RNA, 20 nt, Artificial Sequence
  GATA2 Guide RNA
agggaacccucacaggccag

SEQ ID NO: 34160 - RNA, 20 nt, Artificial Sequence
  GATA2 Guide RNA
agggacgccccugacagaca

SEQ ID NO: 34161 - RNA, 20 nt, Artificial Sequence
  GATA2 Guide RNA
aggggaugacugcugguucu

SEQ ID NO: 34162 - RNA, 20 nt, Artificial Sequence
  GATA2 Guide RNA
aggggcgucccuagcucugc

SEQ ID NO: 34163 - RNA, 20 nt, Artificial Sequence
  GATA2 Guide RNA
aggguaggcagagcuaggga

SEQ ID NO: 34164 - RNA, 20 nt, Artificial Sequence
  GATA2 Guide RNA
agggucugggacccacaggg

SEQ ID NO: 34165 - RNA, 20 nt, Artificial Sequence
  GATA2 Guide RNA
agggucuguccggugggguu

SEQ ID NO: 34166 - RNA, 20 nt, Artificial Sequence
  GATA2 Guide RNA
agggugggcagaaagaucag

SEQ ID NO: 34167 - RNA, 20 nt, Artificial Sequence
  GATA2 Guide RNA
aggguucccuguagggucug

SEQ ID NO: 34168 - RNA, 20 nt, Artificial Sequence
  GATA2 Guide RNA
aggguuucugcccacuucca

SEQ ID NO: 34169 - RNA, 20 nt, Artificial Sequence
  GATA2 Guide RNA
aggugggagcagcggccgau

SEQ ID NO: 34170 - RNA, 20 nt, Artificial Sequence
  GATA2 Guide RNA
agucauccccuccccaaaga

SEQ ID NO: 34171 - RNA, 20 nt, Artificial Sequence
  GATA2 Guide RNA
aguccaagcugaaggacaag

SEQ ID NO: 34172 - RNA, 20 nt, Artificial Sequence
  GATA2 Guide RNA
agucgugaucucaaugucug

SEQ ID NO: 34173 - RNA, 20 nt, Artificial Sequence
  GATA2 Guide RNA
aguggcauagaaggaacccc

SEQ ID NO: 34174 - RNA, 20 nt, Artificial Sequence
  GATA2 Guide RNA
agugggcagaaacccugugg

SEQ ID NO: 34175 - RNA, 20 nt, Artificial Sequence
  GATA2 Guide RNA
auaauaccccaccgguaaua

SEQ ID NO: 34176 - RNA, 20 nt, Artificial Sequence
  GATA2 Guide RNA
auaaucaggaaugucagucc

SEQ ID NO: 34177 - RNA, 20 nt, Artificial Sequence
  GATA2 Guide RNA
auaccccaccgguaauaauc

SEQ ID NO: 34178 - RNA, 20 nt, Artificial Sequence
  GATA2 Guide RNA
auagaaggaaccccaccgga

SEQ ID NO: 34179 - RNA, 20 nt, Artificial Sequence
  GATA2 Guide RNA
aucacgacucccagaaccag

SEQ ID NO: 34180 - RNA, 20 nt, Artificial Sequence
  GATA2 Guide RNA
aucaggaaugucaguccaag

SEQ ID NO: 34181 - RNA, 20 nt, Artificial Sequence
  GATA2 Guide RNA
aucaggguaggcagagcuag

SEQ ID NO: 34182 - RNA, 20 nt, Artificial Sequence
  GATA2 Guide RNA
aucagggugggcagaaagau

SEQ ID NO: 34183 - RNA, 20 nt, Artificial Sequence
  GATA2 Guide RNA
auccccuccccaaagaaagc

SEQ ID NO: 34184 - RNA, 20 nt, Artificial Sequence
  GATA2 Guide RNA
aucggccgcugcucccaccu

SEQ ID NO: 34185 - RNA, 20 nt, Artificial Sequence
  GATA2 Guide RNA
aucucaaugucugucagggg

SEQ ID NO: 34186 - RNA, 20 nt, Artificial Sequence
  GATA2 Guide RNA
aucuuucugcccacccugau

SEQ ID NO: 34187 - RNA, 20 nt, Artificial Sequence
  GATA2 Guide RNA
augacugcugguucugggag

SEQ ID NO: 34188 - RNA, 20 nt, Artificial Sequence
  GATA2 Guide RNA
augccacuuguccuucagcu

SEQ ID NO: 34189 - RNA, 20 nt, Artificial Sequence
  GATA2 Guide RNA
augucaguccaagcugaagg

SEQ ID NO: 34190 - RNA, 20 nt, Artificial Sequence
  GATA2 Guide RNA
augucugucaggggcguccc

SEQ ID NO: 34191 - RNA, 20 nt, Artificial Sequence
  GATA2 Guide RNA
auguuucuggcuuucuuugg

SEQ ID NO: 34192 - RNA, 20 nt, Artificial Sequence
  GATA2 Guide RNA
auuaccggugggguauuaug

SEQ ID NO: 34193 - RNA, 20 nt, Artificial Sequence
  GATA2 Guide RNA
auuauguuucuggcuuucuu

SEQ ID NO: 34194 - RNA, 20 nt, Artificial Sequence
  GATA2 Guide RNA
auuauuaccggugggguauu

SEQ ID NO: 34195 - RNA, 20 nt, Artificial Sequence
  GATA2 Guide RNA
auuccugauuauuaccggug

SEQ ID NO: 34196 - RNA, 20 nt, Artificial Sequence
  GATA2 Guide RNA
auugagaucacgacucccag

SEQ ID NO: 34197 - RNA, 20 nt, Artificial Sequence
  GATA2 Guide RNA
auuggggagggucugggacc

SEQ ID NO: 34198 - RNA, 20 nt, Artificial Sequence
  GATA2 Guide RNA
caaagaaagccagaaacaua

SEQ ID NO: 34199 - RNA, 20 nt, Artificial Sequence
  GATA2 Guide RNA
caaagagagagaggaucagg

SEQ ID NO: 34200 - RNA, 20 nt, Artificial Sequence
  GATA2 Guide RNA
caagcugaaggacaaguggc

SEQ ID NO: 34201 - RNA, 20 nt, Artificial Sequence
  GATA2 Guide RNA
caaguggcauagaaggaacc

SEQ ID NO: 34202 - RNA, 20 nt, Artificial Sequence
  GATA2 Guide RNA
caaucggccgcugcucccac

SEQ ID NO: 34203 - RNA, 20 nt, Artificial Sequence
  GATA2 Guide RNA
caaugucugucaggggcguc

SEQ ID NO: 34204 - RNA, 20 nt, Artificial Sequence
  GATA2 Guide RNA
cacaggccagcuggaagugg

SEQ ID NO: 34205 - RNA, 20 nt, Artificial Sequence
  GATA2 Guide RNA
cacaggguuucugcccacuu

SEQ ID NO: 34206 - RNA, 20 nt, Artificial Sequence
  GATA2 Guide RNA
cacccugauccucucucucu

SEQ ID NO: 34207 - RNA, 20 nt, Artificial Sequence
  GATA2 Guide RNA
caccggacagacccuacagg

SEQ ID NO: 34208 - RNA, 20 nt, Artificial Sequence
  GATA2 Guide RNA
caccgguaauaaucaggaau

SEQ ID NO: 34209 - RNA, 20 nt, Artificial Sequence
  GATA2 Guide RNA
cacgacucccagaaccagca

SEQ ID NO: 34210 - RNA, 20 nt, Artificial Sequence
  GATA2 Guide RNA
cacuuccagcuggccuguga

SEQ ID NO: 34211 - RNA, 20 nt, Artificial Sequence
  GATA2 Guide RNA
cacuuguccuucagcuugga

SEQ ID NO: 34212 - RNA, 20 nt, Artificial Sequence
  GATA2 Guide RNA
cagaaacauaauaccccacc

SEQ ID NO: 34213 - RNA, 20 nt, Artificial Sequence
  GATA2 Guide RNA
cagaaacccuguggguccca

SEQ ID NO: 34214 - RNA, 20 nt, Artificial Sequence
  GATA2 Guide RNA
cagaaagaucaggguaggca

SEQ ID NO: 34215 - RNA, 20 nt, Artificial Sequence
  GATA2 Guide RNA
cagaaccagcagucaucccc

SEQ ID NO: 34216 - RNA, 20 nt, Artificial Sequence
  GATA2 Guide RNA
cagacauugagaucacgacu

SEQ ID NO: 34217 - RNA, 20 nt, Artificial Sequence
  GATA2 Guide RNA
cagacccuacagggaacccu

SEQ ID NO: 34218 - RNA, 20 nt, Artificial Sequence
  GATA2 Guide RNA
cagacccuccccaaucggcc

SEQ ID NO: 34219 - RNA, 20 nt, Artificial Sequence
  GATA2 Guide RNA
cagagcuagggacgccccug

SEQ ID NO: 34220 - RNA, 20 nt, Artificial Sequence
  GATA2 Guide RNA
cagcagucauccccucccca

SEQ ID NO: 34221 - RNA, 20 nt, Artificial Sequence
  GATA2 Guide RNA
cagcggccgauuggggaggg

SEQ ID NO: 34222 - RNA, 20 nt, Artificial Sequence
  GATA2 Guide RNA
cagcuggaagugggcagaaa

SEQ ID NO: 34223 - RNA, 20 nt, Artificial Sequence
  GATA2 Guide RNA
cagcuggccugugaggguuc

SEQ ID NO: 34224 - RNA, 20 nt, Artificial Sequence
  GATA2 Guide RNA
cagcuuggacugacauuccu

SEQ ID NO: 34225 - RNA, 20 nt, Artificial Sequence
  GATA2 Guide RNA
caggaaugucaguccaagcu

SEQ ID NO: 34226 - RNA, 20 nt, Artificial Sequence
  GATA2 Guide RNA
caggccagcuggaagugggc

SEQ ID NO: 34227 - RNA, 20 nt, Artificial Sequence
  GATA2 Guide RNA
cagggaacccucacaggcca

SEQ ID NO: 34228 - RNA, 20 nt, Artificial Sequence
  GATA2 Guide RNA
caggggcgucccuagcucug

SEQ ID NO: 34229 - RNA, 20 nt, Artificial Sequence
  GATA2 Guide RNA
caggguaggcagagcuaggg

SEQ ID NO: 34230 - RNA, 20 nt, Artificial Sequence
  GATA2 Guide RNA
cagggugggcagaaagauca

SEQ ID NO: 34231 - RNA, 20 nt, Artificial Sequence
  GATA2 Guide RNA
caggguuucugcccacuucc

SEQ ID NO: 34232 - RNA, 20 nt, Artificial Sequence
  GATA2 Guide RNA
cagucauccccuccccaaag

SEQ ID NO: 34233 - RNA, 20 nt, Artificial Sequence
  GATA2 Guide RNA
caguccaagcugaaggacaa

SEQ ID NO: 34234 - RNA, 20 nt, Artificial Sequence
  GATA2 Guide RNA
cauaauaccccaccgguaau

SEQ ID NO: 34235 - RNA, 20 nt, Artificial Sequence
  GATA2 Guide RNA
cauagaaggaaccccaccgg

SEQ ID NO: 34236 - RNA, 20 nt, Artificial Sequence
  GATA2 Guide RNA
cauccccuccccaaagaaag

SEQ ID NO: 34237 - RNA, 20 nt, Artificial Sequence
  GATA2 Guide RNA
cauuccugauuauuaccggu

SEQ ID NO: 34238 - RNA, 20 nt, Artificial Sequence
  GATA2 Guide RNA
cauugagaucacgacuccca

SEQ ID NO: 34239 - RNA, 20 nt, Artificial Sequence
  GATA2 Guide RNA
ccaaagaaagccagaaacau

SEQ ID NO: 34240 - RNA, 20 nt, Artificial Sequence
  GATA2 Guide RNA
ccaagcugaaggacaagugg

SEQ ID NO: 34241 - RNA, 20 nt, Artificial Sequence
  GATA2 Guide RNA
ccaaucggccgcugcuccca

SEQ ID NO: 34242 - RNA, 20 nt, Artificial Sequence
  GATA2 Guide RNA
ccacaggguuucugcccacu

SEQ ID NO: 34243 - RNA, 20 nt, Artificial Sequence
  GATA2 Guide RNA
ccacccugauccucucucuc

SEQ ID NO: 34244 - RNA, 20 nt, Artificial Sequence
  GATA2 Guide RNA
ccaccggacagacccuacag

SEQ ID NO: 34245 - RNA, 20 nt, Artificial Sequence
  GATA2 Guide RNA
ccaccgguaauaaucaggaa

SEQ ID NO: 34246 - RNA, 20 nt, Artificial Sequence
  GATA2 Guide RNA
ccacuuccagcuggccugug

SEQ ID NO: 34247 - RNA, 20 nt, Artificial Sequence
  GATA2 Guide RNA
ccacuuguccuucagcuugg

SEQ ID NO: 34248 - RNA, 20 nt, Artificial Sequence
  GATA2 Guide RNA
ccagaaacauaauaccccac

SEQ ID NO: 34249 - RNA, 20 nt, Artificial Sequence
  GATA2 Guide RNA
ccagaaccagcagucauccc

SEQ ID NO: 34250 - RNA, 20 nt, Artificial Sequence
  GATA2 Guide RNA
ccagacccuccccaaucggc

SEQ ID NO: 34251 - RNA, 20 nt, Artificial Sequence
  GATA2 Guide RNA
ccagcagucauccccucccc

SEQ ID NO: 34252 - RNA, 20 nt, Artificial Sequence
  GATA2 Guide RNA
ccagcuggaagugggcagaa

SEQ ID NO: 34253 - RNA, 20 nt, Artificial Sequence
  GATA2 Guide RNA
ccagcuggccugugaggguu

SEQ ID NO: 34254 - RNA, 20 nt, Artificial Sequence
  GATA2 Guide RNA
cccaaagaaagccagaaaca

SEQ ID NO: 34255 - RNA, 20 nt, Artificial Sequence
  GATA2 Guide RNA
cccaaucggccgcugcuccc

SEQ ID NO: 34256 - RNA, 20 nt, Artificial Sequence
  GATA2 Guide RNA
cccacaggguuucugcccac

SEQ ID NO: 34257 - RNA, 20 nt, Artificial Sequence
  GATA2 Guide RNA
cccacccugauccucucucu

SEQ ID NO: 34258 - RNA, 20 nt, Artificial Sequence
  GATA2 Guide RNA
cccaccggacagacccuaca

SEQ ID NO: 34259 - RNA, 20 nt, Artificial Sequence
  GATA2 Guide RNA
cccaccgguaauaaucagga

SEQ ID NO: 34260 - RNA, 20 nt, Artificial Sequence
  GATA2 Guide RNA
cccacuuccagcuggccugu

SEQ ID NO: 34261 - RNA, 20 nt, Artificial Sequence
  GATA2 Guide RNA
cccagaaccagcagucaucc

SEQ ID NO: 34262 - RNA, 20 nt, Artificial Sequence
  GATA2 Guide RNA
cccagacccuccccaaucgg

SEQ ID NO: 34263 - RNA, 20 nt, Artificial Sequence
  GATA2 Guide RNA
ccccaaagaaagccagaaac

SEQ ID NO: 34264 - RNA, 20 nt, Artificial Sequence
  GATA2 Guide RNA
ccccaaucggccgcugcucc

SEQ ID NO: 34265 - RNA, 20 nt, Artificial Sequence
  GATA2 Guide RNA
ccccaccggacagacccuac

SEQ ID NO: 34266 - RNA, 20 nt, Artificial Sequence
  GATA2 Guide RNA
ccccaccgguaauaaucagg

SEQ ID NO: 34267 - RNA, 20 nt, Artificial Sequence
  GATA2 Guide RNA
ccccuccccaaagaaagcca

SEQ ID NO: 34268 - RNA, 20 nt, Artificial Sequence
  GATA2 Guide RNA
ccccugacagacauugagau

SEQ ID NO: 34269 - RNA, 20 nt, Artificial Sequence
  GATA2 Guide RNA
cccuacagggaacccucaca

SEQ ID NO: 34270 - RNA, 20 nt, Artificial Sequence
  GATA2 Guide RNA
cccuagcucugccuacccug

SEQ ID NO: 34271 - RNA, 20 nt, Artificial Sequence
  GATA2 Guide RNA
cccucacaggccagcuggaa

SEQ ID NO: 34272 - RNA, 20 nt, Artificial Sequence
  GATA2 Guide RNA
cccuccccaaagaaagccag

SEQ ID NO: 34273 - RNA, 20 nt, Artificial Sequence
  GATA2 Guide RNA
cccuccccaaucggccgcug

SEQ ID NO: 34274 - RNA, 20 nt, Artificial Sequence
  GATA2 Guide RNA
cccugacagacauugagauc

SEQ ID NO: 34275 - RNA, 20 nt, Artificial Sequence
  GATA2 Guide RNA
cccugauccucucucucuuu

SEQ ID NO: 34276 - RNA, 20 nt, Artificial Sequence
  GATA2 Guide RNA
cccugaucuuucugcccacc

SEQ ID NO: 34277 - RNA, 20 nt, Artificial Sequence
  GATA2 Guide RNA
cccuguagggucuguccggu

SEQ ID NO: 34278 - RNA, 20 nt, Artificial Sequence
  GATA2 Guide RNA
cccugugggucccagacccu

SEQ ID NO: 34279 - RNA, 20 nt, Artificial Sequence
  GATA2 Guide RNA
ccgauuggggagggucuggg

SEQ ID NO: 34280 - RNA, 20 nt, Artificial Sequence
  GATA2 Guide RNA
ccggacagacccuacaggga

SEQ ID NO: 34281 - RNA, 20 nt, Artificial Sequence
  GATA2 Guide RNA
ccgguaauaaucaggaaugu

SEQ ID NO: 34282 - RNA, 20 nt, Artificial Sequence
  GATA2 Guide RNA
ccggugggguauuauguuuc

SEQ ID NO: 34283 - RNA, 20 nt, Artificial Sequence
  GATA2 Guide RNA
ccggugggguuccuucuaug

SEQ ID NO: 34284 - RNA, 20 nt, Artificial Sequence
  GATA2 Guide RNA
ccuacagggaacccucacag

SEQ ID NO: 34285 - RNA, 20 nt, Artificial Sequence
  GATA2 Guide RNA
ccuacccugaucuuucugcc

SEQ ID NO: 34286 - RNA, 20 nt, Artificial Sequence
  GATA2 Guide RNA
ccuagcucugccuacccuga

SEQ ID NO: 34287 - RNA, 20 nt, Artificial Sequence
  GATA2 Guide RNA
ccucacaggccagcuggaag

SEQ ID NO: 34288 - RNA, 20 nt, Artificial Sequence
  GATA2 Guide RNA
ccuccccaaagaaagccaga

SEQ ID NO: 34289 - RNA, 20 nt, Artificial Sequence
  GATA2 Guide RNA
ccuccccaaucggccgcugc

SEQ ID NO: 34290 - RNA, 20 nt, Artificial Sequence
  GATA2 Guide RNA
ccugacagacauugagauca

SEQ ID NO: 34291 - RNA, 20 nt, Artificial Sequence
  GATA2 Guide RNA
ccugauccucucucucuuug

SEQ ID NO: 34292 - RNA, 20 nt, Artificial Sequence
  GATA2 Guide RNA
ccugaucuuucugcccaccc

SEQ ID NO: 34293 - RNA, 20 nt, Artificial Sequence
  GATA2 Guide RNA
ccugauuauuaccggugggg

SEQ ID NO: 34294 - RNA, 20 nt, Artificial Sequence
  GATA2 Guide RNA
ccuguagggucuguccggug

SEQ ID NO: 34295 - RNA, 20 nt, Artificial Sequence
  GATA2 Guide RNA
ccugugaggguucccuguag

SEQ ID NO: 34296 - RNA, 20 nt, Artificial Sequence
  GATA2 Guide RNA
ccugugggucccagacccuc

SEQ ID NO: 34297 - RNA, 20 nt, Artificial Sequence
  GATA2 Guide RNA
ccuucagcuuggacugacau

SEQ ID NO: 34298 - RNA, 20 nt, Artificial Sequence
  GATA2 Guide RNA
ccuucuaugccacuuguccu

SEQ ID NO: 34299 - RNA, 20 nt, Artificial Sequence
  GATA2 Guide RNA
cgacucccagaaccagcagu

SEQ ID NO: 34300 - RNA, 20 nt, Artificial Sequence
  GATA2 Guide RNA
cgauuggggagggucuggga

SEQ ID NO: 34301 - RNA, 20 nt, Artificial Sequence
  GATA2 Guide RNA
cgccccugacagacauugag

SEQ ID NO: 34302 - RNA, 20 nt, Artificial Sequence
  GATA2 Guide RNA
cggacagacccuacagggaa

SEQ ID NO: 34303 - RNA, 20 nt, Artificial Sequence
  GATA2 Guide RNA
cggccgauuggggagggucu

SEQ ID NO: 34304 - RNA, 20 nt, Artificial Sequence
  GATA2 Guide RNA
cgggcaaagagagagaggau

SEQ ID NO: 34305 - RNA, 20 nt, Artificial Sequence
  GATA2 Guide RNA
cgguaauaaucaggaauguc

SEQ ID NO: 34306 - RNA, 20 nt, Artificial Sequence
  GATA2 Guide RNA
cggugggguauuauguuucu

SEQ ID NO: 34307 - RNA, 20 nt, Artificial Sequence
  GATA2 Guide RNA
cggugggguuccuucuaugc

SEQ ID NO: 34308 - RNA, 20 nt, Artificial Sequence
  GATA2 Guide RNA
cgucccuagcucugccuacc

SEQ ID NO: 34309 - RNA, 20 nt, Artificial Sequence
  GATA2 Guide RNA
cgugaucucaaugucuguca

SEQ ID NO: 34310 - RNA, 20 nt, Artificial Sequence
  GATA2 Guide RNA
cuacagggaacccucacagg

SEQ ID NO: 34311 - RNA, 20 nt, Artificial Sequence
  GATA2 Guide RNA
cuacccugaucuuucugccc

SEQ ID NO: 34312 - RNA, 20 nt, Artificial Sequence
  GATA2 Guide RNA
cuagcucugccuacccugau

SEQ ID NO: 34313 - RNA, 20 nt, Artificial Sequence
  GATA2 Guide RNA
cuagggacgccccugacaga

SEQ ID NO: 34314 - RNA, 20 nt, Artificial Sequence
  GATA2 Guide RNA
cuaugccacuuguccuucag

SEQ ID NO: 34315 - RNA, 20 nt, Artificial Sequence
  GATA2 Guide RNA
cucaaugucugucaggggcg

SEQ ID NO: 34316 - RNA, 20 nt, Artificial Sequence
  GATA2 Guide RNA
cucacaggccagcuggaagu

SEQ ID NO: 34317 - RNA, 20 nt, Artificial Sequence
  GATA2 Guide RNA
cucccagaaccagcagucau

SEQ ID NO: 34318 - RNA, 20 nt, Artificial Sequence
  GATA2 Guide RNA
cuccccaaagaaagccagaa

SEQ ID NO: 34319 - RNA, 20 nt, Artificial Sequence
  GATA2 Guide RNA
cuccccaaucggccgcugcu

SEQ ID NO: 34320 - RNA, 20 nt, Artificial Sequence
  GATA2 Guide RNA
cucugccuacccugaucuuu

SEQ ID NO: 34321 - RNA, 20 nt, Artificial Sequence
  GATA2 Guide RNA
cugaaggacaaguggcauag

SEQ ID NO: 34322 - RNA, 20 nt, Artificial Sequence
  GATA2 Guide RNA
cugacagacauugagaucac

SEQ ID NO: 34323 - RNA, 20 nt, Artificial Sequence
  GATA2 Guide RNA
cugacauuccugauuauuac

SEQ ID NO: 34324 - RNA, 20 nt, Artificial Sequence
  GATA2 Guide RNA
cugauccucucucucuuugc

SEQ ID NO: 34325 - RNA, 20 nt, Artificial Sequence
  GATA2 Guide RNA
cugaucuuucugcccacccu

SEQ ID NO: 34326 - RNA, 20 nt, Artificial Sequence
  GATA2 Guide RNA
cugauuauuaccgguggggu

SEQ ID NO: 34327 - RNA, 20 nt, Artificial Sequence
  GATA2 Guide RNA
cugcccacccugauccucuc

SEQ ID NO: 34328 - RNA, 20 nt, Artificial Sequence
  GATA2 Guide RNA
cugcccacuuccagcuggcc

SEQ ID NO: 34329 - RNA, 20 nt, Artificial Sequence
  GATA2 Guide RNA
cugccuacccugaucuuucu

SEQ ID NO: 34330 - RNA, 20 nt, Artificial Sequence
  GATA2 Guide RNA
cugcugguucugggagucgu

SEQ ID NO: 34331 - RNA, 20 nt, Artificial Sequence
  GATA2 Guide RNA
cuggaagugggcagaaaccc

SEQ ID NO: 34332 - RNA, 20 nt, Artificial Sequence
  GATA2 Guide RNA
cuggccugugaggguucccu

SEQ ID NO: 34333 - RNA, 20 nt, Artificial Sequence
  GATA2 Guide RNA
cuggcuuucuuuggggaggg

SEQ ID NO: 34334 - RNA, 20 nt, Artificial Sequence
  GATA2 Guide RNA
cugggacccacaggguuucu

SEQ ID NO: 34335 - RNA, 20 nt, Artificial Sequence
  GATA2 Guide RNA
cugggagucgugaucucaau

SEQ ID NO: 34336 - RNA, 20 nt, Artificial Sequence
  GATA2 Guide RNA
cugguucugggagucgugau

SEQ ID NO: 34337 - RNA, 20 nt, Artificial Sequence
  GATA2 Guide RNA
cuguagggucuguccggugg

SEQ ID NO: 34338 - RNA, 20 nt, Artificial Sequence
  GATA2 Guide RNA
cugucaggggcgucccuagc

SEQ ID NO: 34339 - RNA, 20 nt, Artificial Sequence
  GATA2 Guide RNA
cuguccggugggguuccuuc

SEQ ID NO: 34340 - RNA, 20 nt, Artificial Sequence
  GATA2 Guide RNA
cugugaggguucccuguagg

SEQ ID NO: 34341 - RNA, 20 nt, Artificial Sequence
  GATA2 Guide RNA
cugugggucccagacccucc

SEQ ID NO: 34342 - RNA, 20 nt, Artificial Sequence
  GATA2 Guide RNA
cuucagcuuggacugacauu

SEQ ID NO: 34343 - RNA, 20 nt, Artificial Sequence
  GATA2 Guide RNA
cuuccagcuggccugugagg

SEQ ID NO: 34344 - RNA, 20 nt, Artificial Sequence
  GATA2 Guide RNA
cuucuaugccacuuguccuu

SEQ ID NO: 34345 - RNA, 20 nt, Artificial Sequence
  GATA2 Guide RNA
cuuggacugacauuccugau

SEQ ID NO: 34346 - RNA, 20 nt, Artificial Sequence
  GATA2 Guide RNA
cuuguccuucagcuuggacu

SEQ ID NO: 34347 - RNA, 20 nt, Artificial Sequence
  GATA2 Guide RNA
cuuucugcccacccugaucc

SEQ ID NO: 34348 - RNA, 20 nt, Artificial Sequence
  GATA2 Guide RNA
cuuucuuuggggaggggaug

SEQ ID NO: 34349 - RNA, 20 nt, Artificial Sequence
  GATA2 Guide RNA
cuuuggggaggggaugacug

SEQ ID NO: 34350 - RNA, 20 nt, Artificial Sequence
  GATA2 Guide RNA
gaaacauaauaccccaccgg

SEQ ID NO: 34351 - RNA, 20 nt, Artificial Sequence
  GATA2 Guide RNA
gaaacccugugggucccaga

SEQ ID NO: 34352 - RNA, 20 nt, Artificial Sequence
  GATA2 Guide RNA
gaaagaucaggguaggcaga

SEQ ID NO: 34353 - RNA, 20 nt, Artificial Sequence
  GATA2 Guide RNA
gaaagccagaaacauaauac

SEQ ID NO: 34354 - RNA, 20 nt, Artificial Sequence
  GATA2 Guide RNA
gaaccagcagucauccccuc

SEQ ID NO: 34355 - RNA, 20 nt, Artificial Sequence
  GATA2 Guide RNA
gaaccccaccggacagaccc

SEQ ID NO: 34356 - RNA, 20 nt, Artificial Sequence
  GATA2 Guide RNA
gaacccucacaggccagcug

SEQ ID NO: 34357 - RNA, 20 nt, Artificial Sequence
  GATA2 Guide RNA
gaaggaaccccaccggacag

SEQ ID NO: 34358 - RNA, 20 nt, Artificial Sequence
  GATA2 Guide RNA
gaaggacaaguggcauagaa

SEQ ID NO: 34359 - RNA, 20 nt, Artificial Sequence
  GATA2 Guide RNA
gaagugggcagaaacccugu

SEQ ID NO: 34360 - RNA, 20 nt, Artificial Sequence
  GATA2 Guide RNA
gaaugucaguccaagcugaa

SEQ ID NO: 34361 - RNA, 20 nt, Artificial Sequence
  GATA2 Guide RNA
gacaaguggcauagaaggaa

SEQ ID NO: 34362 - RNA, 20 nt, Artificial Sequence
  GATA2 Guide RNA
gacagacauugagaucacga

SEQ ID NO: 34363 - RNA, 20 nt, Artificial Sequence
  GATA2 Guide RNA
gacagacccuacagggaacc

SEQ ID NO: 34364 - RNA, 20 nt, Artificial Sequence
  GATA2 Guide RNA
gacauuccugauuauuaccg

SEQ ID NO: 34365 - RNA, 20 nt, Artificial Sequence
  GATA2 Guide RNA
gacauugagaucacgacucc

SEQ ID NO: 34366 - RNA, 20 nt, Artificial Sequence
  GATA2 Guide RNA
gacccacaggguuucugccc

SEQ ID NO: 34367 - RNA, 20 nt, Artificial Sequence
  GATA2 Guide RNA
gacccuacagggaacccuca

SEQ ID NO: 34368 - RNA, 20 nt, Artificial Sequence
  GATA2 Guide RNA
gacccuccccaaucggccgc

SEQ ID NO: 34369 - RNA, 20 nt, Artificial Sequence
  GATA2 Guide RNA
gacgccccugacagacauug

SEQ ID NO: 34370 - RNA, 20 nt, Artificial Sequence
  GATA2 Guide RNA
gacucccagaaccagcaguc

SEQ ID NO: 34371 - RNA, 20 nt, Artificial Sequence
  GATA2 Guide RNA
gacugacauuccugauuauu

SEQ ID NO: 34372 - RNA, 20 nt, Artificial Sequence
  GATA2 Guide RNA
gacugcugguucugggaguc

SEQ ID NO: 34373 - RNA, 20 nt, Artificial Sequence
  GATA2 Guide RNA
gagagagaggaucagggugg

SEQ ID NO: 34374 - RNA, 20 nt, Artificial Sequence
  GATA2 Guide RNA
gagagaggaucagggugggc

SEQ ID NO: 34375 - RNA, 20 nt, Artificial Sequence
  GATA2 Guide RNA
gagaggaucagggugggcag

SEQ ID NO: 34376 - RNA, 20 nt, Artificial Sequence
  GATA2 Guide RNA
gagaggugggagcagcggcc

SEQ ID NO: 34377 - RNA, 20 nt, Artificial Sequence
  GATA2 Guide RNA
gagaucacgacucccagaac

SEQ ID NO: 34378 - RNA, 20 nt, Artificial Sequence
  GATA2 Guide RNA
gagcagcggccgauugggga

SEQ ID NO: 34379 - RNA, 20 nt, Artificial Sequence
  GATA2 Guide RNA
gagcuagggacgccccugac

SEQ ID NO: 34380 - RNA, 20 nt, Artificial Sequence
  GATA2 Guide RNA
gaggaucagggugggcagaa

SEQ ID NO: 34381 - RNA, 20 nt, Artificial Sequence
  GATA2 Guide RNA
gaggggaugacugcugguuc

SEQ ID NO: 34382 - RNA, 20 nt, Artificial Sequence
  GATA2 Guide RNA
gagggucugggacccacagg

SEQ ID NO: 34383 - RNA, 20 nt, Artificial Sequence
  GATA2 Guide RNA
gaggguucccuguagggucu

SEQ ID NO: 34384 - RNA, 20 nt, Artificial Sequence
  GATA2 Guide RNA
gaggugggagcagcggccga

SEQ ID NO: 34385 - RNA, 20 nt, Artificial Sequence
  GATA2 Guide RNA
gagucgugaucucaaugucu

SEQ ID NO: 34386 - RNA, 20 nt, Artificial Sequence
  GATA2 Guide RNA
gaucacgacucccagaacca

SEQ ID NO: 34387 - RNA, 20 nt, Artificial Sequence
  GATA2 Guide RNA
gaucaggguaggcagagcua

SEQ ID NO: 34388 - RNA, 20 nt, Artificial Sequence
  GATA2 Guide RNA
gaucagggugggcagaaaga

SEQ ID NO: 34389 - RNA, 20 nt, Artificial Sequence
  GATA2 Guide RNA
gaucucaaugucugucaggg

SEQ ID NO: 34390 - RNA, 20 nt, Artificial Sequence
  GATA2 Guide RNA
gaucuuucugcccacccuga

SEQ ID NO: 34391 - RNA, 20 nt, Artificial Sequence
  GATA2 Guide RNA
gaugacugcugguucuggga

SEQ ID NO: 34392 - RNA, 20 nt, Artificial Sequence
  GATA2 Guide RNA
gauuauuaccggugggguau

SEQ ID NO: 34393 - RNA, 20 nt, Artificial Sequence
  GATA2 Guide RNA
gauuggggagggucugggac

SEQ ID NO: 34394 - RNA, 20 nt, Artificial Sequence
  GATA2 Guide RNA
gcaaagagagagaggaucag

SEQ ID NO: 34395 - RNA, 20 nt, Artificial Sequence
  GATA2 Guide RNA
gcagaaacccuguggguccc

SEQ ID NO: 34396 - RNA, 20 nt, Artificial Sequence
  GATA2 Guide RNA
gcagaaagaucaggguaggc

SEQ ID NO: 34397 - RNA, 20 nt, Artificial Sequence
  GATA2 Guide RNA
gcagagcuagggacgccccu

SEQ ID NO: 34398 - RNA, 20 nt, Artificial Sequence
  GATA2 Guide RNA
gcagcggccgauuggggagg

SEQ ID NO: 34399 - RNA, 20 nt, Artificial Sequence
  GATA2 Guide RNA
gcagucauccccuccccaaa

SEQ ID NO: 34400 - RNA, 20 nt, Artificial Sequence
  GATA2 Guide RNA
gcauagaaggaaccccaccg

SEQ ID NO: 34401 - RNA, 20 nt, Artificial Sequence
  GATA2 Guide RNA
gccacuuguccuucagcuug

SEQ ID NO: 34402 - RNA, 20 nt, Artificial Sequence
  GATA2 Guide RNA
gccagaaacauaauacccca

SEQ ID NO: 34403 - RNA, 20 nt, Artificial Sequence
  GATA2 Guide RNA
gccagcuggaagugggcaga

SEQ ID NO: 34404 - RNA, 20 nt, Artificial Sequence
  GATA2 Guide RNA
gcccacccugauccucucuc

SEQ ID NO: 34405 - RNA, 20 nt, Artificial Sequence
  GATA2 Guide RNA
gcccacuuccagcuggccug

SEQ ID NO: 34406 - RNA, 20 nt, Artificial Sequence
  GATA2 Guide RNA
gccccugacagacauugaga

SEQ ID NO: 34407 - RNA, 20 nt, Artificial Sequence
  GATA2 Guide RNA
gccgauuggggagggucugg

SEQ ID NO: 34408 - RNA, 20 nt, Artificial Sequence
  GATA2 Guide RNA
gccuacccugaucuuucugc

SEQ ID NO: 34409 - RNA, 20 nt, Artificial Sequence
  GATA2 Guide RNA
gccugugaggguucccugua

SEQ ID NO: 34410 - RNA, 20 nt, Artificial Sequence
  GATA2 Guide RNA
gcggccgauuggggaggguc

SEQ ID NO: 34411 - RNA, 20 nt, Artificial Sequence
  GATA2 Guide RNA
gcgggcaaagagagagagga

SEQ ID NO: 34412 - RNA, 20 nt, Artificial Sequence
  GATA2 Guide RNA
gcgucccuagcucugccuac

SEQ ID NO: 34413 - RNA, 20 nt, Artificial Sequence
  GATA2 Guide RNA
gcuagggacgccccugacag

SEQ ID NO: 34414 - RNA, 20 nt, Artificial Sequence
  GATA2 Guide RNA
gcucugccuacccugaucuu

SEQ ID NO: 34415 - RNA, 20 nt, Artificial Sequence
  GATA2 Guide RNA
gcugaaggacaaguggcaua

SEQ ID NO: 34416 - RNA, 20 nt, Artificial Sequence
  GATA2 Guide RNA
gcuggaagugggcagaaacc

SEQ ID NO: 34417 - RNA, 20 nt, Artificial Sequence
  GATA2 Guide RNA
gcuggccugugaggguuccc

SEQ ID NO: 34418 - RNA, 20 nt, Artificial Sequence
  GATA2 Guide RNA
gcugguucugggagucguga

SEQ ID NO: 34419 - RNA, 20 nt, Artificial Sequence
  GATA2 Guide RNA
gcuuggacugacauuccuga

SEQ ID NO: 34420 - RNA, 20 nt, Artificial Sequence
  GATA2 Guide RNA
gcuuucuuuggggaggggau

SEQ ID NO: 34421 - RNA, 20 nt, Artificial Sequence
  GATA2 Guide RNA
ggaaccccaccggacagacc

SEQ ID NO: 34422 - RNA, 20 nt, Artificial Sequence
  GATA2 Guide RNA
ggaacccucacaggccagcu

SEQ ID NO: 34423 - RNA, 20 nt, Artificial Sequence
  GATA2 Guide RNA
ggaagugggcagaaacccug

SEQ ID NO: 34424 - RNA, 20 nt, Artificial Sequence
  GATA2 Guide RNA
ggaaugucaguccaagcuga

SEQ ID NO: 34425 - RNA, 20 nt, Artificial Sequence
  GATA2 Guide RNA
ggacaaguggcauagaagga

SEQ ID NO: 34426 - RNA, 20 nt, Artificial Sequence
  GATA2 Guide RNA
ggacagacccuacagggaac

SEQ ID NO: 34427 - RNA, 20 nt, Artificial Sequence
  GATA2 Guide RNA
ggacccacaggguuucugcc

SEQ ID NO: 34428 - RNA, 20 nt, Artificial Sequence
  GATA2 Guide RNA
ggacgccccugacagacauu

SEQ ID NO: 34429 - RNA, 20 nt, Artificial Sequence
  GATA2 Guide RNA
ggacugacauuccugauuau

SEQ ID NO: 34430 - RNA, 20 nt, Artificial Sequence
  GATA2 Guide RNA
ggagaggugggagcagcggc

SEQ ID NO: 34431 - RNA, 20 nt, Artificial Sequence
  GATA2 Guide RNA
ggagcagcggccgauugggg

SEQ ID NO: 34432 - RNA, 20 nt, Artificial Sequence
  GATA2 Guide RNA
ggaggggaugacugcugguu

SEQ ID NO: 34433 - RNA, 20 nt, Artificial Sequence
  GATA2 Guide RNA
ggagggucugggacccacag

SEQ ID NO: 34434 - RNA, 20 nt, Artificial Sequence
  GATA2 Guide RNA
ggagucgugaucucaauguc

SEQ ID NO: 34435 - RNA, 20 nt, Artificial Sequence
  GATA2 Guide RNA
ggaucagggugggcagaaag

SEQ ID NO: 34436 - RNA, 20 nt, Artificial Sequence
  GATA2 Guide RNA
ggaugacugcugguucuggg

SEQ ID NO: 34437 - RNA, 20 nt, Artificial Sequence
  GATA2 Guide RNA
ggcaaagagagagaggauca

SEQ ID NO: 34438 - RNA, 20 nt, Artificial Sequence
  GATA2 Guide RNA
ggcagaaacccugugggucc

SEQ ID NO: 34439 - RNA, 20 nt, Artificial Sequence
  GATA2 Guide RNA
ggcagaaagaucaggguagg

SEQ ID NO: 34440 - RNA, 20 nt, Artificial Sequence
  GATA2 Guide RNA
ggcagagcuagggacgcccc

SEQ ID NO: 34441 - RNA, 20 nt, Artificial Sequence
  GATA2 Guide RNA
ggcauagaaggaaccccacc

SEQ ID NO: 34442 - RNA, 20 nt, Artificial Sequence
  GATA2 Guide RNA
ggccagcuggaagugggcag

SEQ ID NO: 34443 - RNA, 20 nt, Artificial Sequence
  GATA2 Guide RNA
ggccgauuggggagggucug

SEQ ID NO: 34444 - RNA, 20 nt, Artificial Sequence
  GATA2 Guide RNA
ggccugugaggguucccugu

SEQ ID NO: 34445 - RNA, 20 nt, Artificial Sequence
  GATA2 Guide RNA
ggcgucccuagcucugccua

SEQ ID NO: 34446 - RNA, 20 nt, Artificial Sequence
  GATA2 Guide RNA
ggcuuucuuuggggagggga

SEQ ID NO: 34447 - RNA, 20 nt, Artificial Sequence
  GATA2 Guide RNA
gggaacccucacaggccagc

SEQ ID NO: 34448 - RNA, 20 nt, Artificial Sequence
  GATA2 Guide RNA
gggacccacaggguuucugc

SEQ ID NO: 34449 - RNA, 20 nt, Artificial Sequence
  GATA2 Guide RNA
gggacgccccugacagacau

SEQ ID NO: 34450 - RNA, 20 nt, Artificial Sequence
  GATA2 Guide RNA
gggagaggugggagcagcgg

SEQ ID NO: 34451 - RNA, 20 nt, Artificial Sequence
  GATA2 Guide RNA
gggagcagcggccgauuggg

SEQ ID NO: 34452 - RNA, 20 nt, Artificial Sequence
  GATA2 Guide RNA
gggaggggaugacugcuggu

SEQ ID NO: 34453 - RNA, 20 nt, Artificial Sequence
  GATA2 Guide RNA
gggagggucugggacccaca

SEQ ID NO: 34454 - RNA, 20 nt, Artificial Sequence
  GATA2 Guide RNA
gggagucgugaucucaaugu

SEQ ID NO: 34455 - RNA, 20 nt, Artificial Sequence
  GATA2 Guide RNA
gggaugacugcugguucugg

SEQ ID NO: 34456 - RNA, 20 nt, Artificial Sequence
  GATA2 Guide RNA
gggcaaagagagagaggauc

SEQ ID NO: 34457 - RNA, 20 nt, Artificial Sequence
  GATA2 Guide RNA
gggcagaaacccuguggguc

SEQ ID NO: 34458 - RNA, 20 nt, Artificial Sequence
  GATA2 Guide RNA
gggcagaaagaucaggguag

SEQ ID NO: 34459 - RNA, 20 nt, Artificial Sequence
  GATA2 Guide RNA
gggcgucccuagcucugccu

SEQ ID NO: 34460 - RNA, 20 nt, Artificial Sequence
  GATA2 Guide RNA
ggggaggggaugacugcugg

SEQ ID NO: 34461 - RNA, 20 nt, Artificial Sequence
  GATA2 Guide RNA
ggggagggucugggacccac

SEQ ID NO: 34462 - RNA, 20 nt, Artificial Sequence
  GATA2 Guide RNA
ggggaugacugcugguucug

SEQ ID NO: 34463 - RNA, 20 nt, Artificial Sequence
  GATA2 Guide RNA
ggggcgucccuagcucugcc

SEQ ID NO: 34464 - RNA, 20 nt, Artificial Sequence
  GATA2 Guide RNA
gggguauuauguuucuggcu

SEQ ID NO: 34465 - RNA, 20 nt, Artificial Sequence
  GATA2 Guide RNA
gggguuccuucuaugccacu

SEQ ID NO: 34466 - RNA, 20 nt, Artificial Sequence
  GATA2 Guide RNA
ggguaggcagagcuagggac

SEQ ID NO: 34467 - RNA, 20 nt, Artificial Sequence
  GATA2 Guide RNA
ggguauuauguuucuggcuu

SEQ ID NO: 34468 - RNA, 20 nt, Artificial Sequence
  GATA2 Guide RNA
gggucccagacccuccccaa

SEQ ID NO: 34469 - RNA, 20 nt, Artificial Sequence
  GATA2 Guide RNA
gggucugggacccacagggu

SEQ ID NO: 34470 - RNA, 20 nt, Artificial Sequence
  GATA2 Guide RNA
gggucuguccggugggguuc

SEQ ID NO: 34471 - RNA, 20 nt, Artificial Sequence
  GATA2 Guide RNA
gggugggcagaaagaucagg

SEQ ID NO: 34472 - RNA, 20 nt, Artificial Sequence
  GATA2 Guide RNA
ggguucccuguagggucugu

SEQ ID NO: 34473 - RNA, 20 nt, Artificial Sequence
  GATA2 Guide RNA
ggguuccuucuaugccacuu

SEQ ID NO: 34474 - RNA, 20 nt, Artificial Sequence
  GATA2 Guide RNA
ggguuucugcccacuuccag

SEQ ID NO: 34475 - RNA, 20 nt, Artificial Sequence
  GATA2 Guide RNA
gguaauaaucaggaauguca

SEQ ID NO: 34476 - RNA, 20 nt, Artificial Sequence
  GATA2 Guide RNA
gguaggcagagcuagggacg

SEQ ID NO: 34477 - RNA, 20 nt, Artificial Sequence
  GATA2 Guide RNA
gguauuauguuucuggcuuu

SEQ ID NO: 34478 - RNA, 20 nt, Artificial Sequence
  GATA2 Guide RNA
ggucccagacccuccccaau

SEQ ID NO: 34479 - RNA, 20 nt, Artificial Sequence
  GATA2 Guide RNA
ggucugggacccacaggguu

SEQ ID NO: 34480 - RNA, 20 nt, Artificial Sequence
  GATA2 Guide RNA
ggucuguccggugggguucc

SEQ ID NO: 34481 - RNA, 20 nt, Artificial Sequence
  GATA2 Guide RNA
ggugggagcagcggccgauu

SEQ ID NO: 34482 - RNA, 20 nt, Artificial Sequence
  GATA2 Guide RNA
ggugggcagaaagaucaggg

SEQ ID NO: 34483 - RNA, 20 nt, Artificial Sequence
  GATA2 Guide RNA
ggugggguauuauguuucug

SEQ ID NO: 34484 - RNA, 20 nt, Artificial Sequence
  GATA2 Guide RNA
ggugggguuccuucuaugcc

SEQ ID NO: 34485 - RNA, 20 nt, Artificial Sequence
  GATA2 Guide RNA
gguucccuguagggucuguc

SEQ ID NO: 34486 - RNA, 20 nt, Artificial Sequence
  GATA2 Guide RNA
gguuccuucuaugccacuug

SEQ ID NO: 34487 - RNA, 20 nt, Artificial Sequence
  GATA2 Guide RNA
gguucugggagucgugaucu

SEQ ID NO: 34488 - RNA, 20 nt, Artificial Sequence
  GATA2 Guide RNA
gguuucugcccacuuccagc

SEQ ID NO: 34489 - RNA, 20 nt, Artificial Sequence
  GATA2 Guide RNA
guaauaaucaggaaugucag

SEQ ID NO: 34490 - RNA, 20 nt, Artificial Sequence
  GATA2 Guide RNA
guaggcagagcuagggacgc

SEQ ID NO: 34491 - RNA, 20 nt, Artificial Sequence
  GATA2 Guide RNA
guagggucuguccggugggg

SEQ ID NO: 34492 - RNA, 20 nt, Artificial Sequence
  GATA2 Guide RNA
guauuauguuucuggcuuuc

SEQ ID NO: 34493 - RNA, 20 nt, Artificial Sequence
  GATA2 Guide RNA
gucaggggcgucccuagcuc

SEQ ID NO: 34494 - RNA, 20 nt, Artificial Sequence
  GATA2 Guide RNA
gucaguccaagcugaaggac

SEQ ID NO: 34495 - RNA, 20 nt, Artificial Sequence
  GATA2 Guide RNA
gucauccccuccccaaagaa

SEQ ID NO: 34496 - RNA, 20 nt, Artificial Sequence
  GATA2 Guide RNA
guccaagcugaaggacaagu

SEQ ID NO: 34497 - RNA, 20 nt, Artificial Sequence
  GATA2 Guide RNA
gucccagacccuccccaauc

SEQ ID NO: 34498 - RNA, 20 nt, Artificial Sequence
  GATA2 Guide RNA
gucccuagcucugccuaccc

SEQ ID NO: 34499 - RNA, 20 nt, Artificial Sequence
  GATA2 Guide RNA
guccggugggguuccuucua

SEQ ID NO: 34500 - RNA, 20 nt, Artificial Sequence
  GATA2 Guide RNA
guccuucagcuuggacugac

SEQ ID NO: 34501 - RNA, 20 nt, Artificial Sequence
  GATA2 Guide RNA
gucgugaucucaaugucugu

SEQ ID NO: 34502 - RNA, 20 nt, Artificial Sequence
  GATA2 Guide RNA
gucugggacccacaggguuu

SEQ ID NO: 34503 - RNA, 20 nt, Artificial Sequence
  GATA2 Guide RNA
gucugucaggggcgucccua

SEQ ID NO: 34504 - RNA, 20 nt, Artificial Sequence
  GATA2 Guide RNA
gucuguccggugggguuccu

SEQ ID NO: 34505 - RNA, 20 nt, Artificial Sequence
  GATA2 Guide RNA
gugaggguucccuguagggu

SEQ ID NO: 34506 - RNA, 20 nt, Artificial Sequence
  GATA2 Guide RNA
gugaucucaaugucugucag

SEQ ID NO: 34507 - RNA, 20 nt, Artificial Sequence
  GATA2 Guide RNA
guggcauagaaggaacccca

SEQ ID NO: 34508 - RNA, 20 nt, Artificial Sequence
  GATA2 Guide RNA
gugggagcagcggccgauug

SEQ ID NO: 34509 - RNA, 20 nt, Artificial Sequence
  GATA2 Guide RNA
gugggcagaaacccuguggg

SEQ ID NO: 34510 - RNA, 20 nt, Artificial Sequence
  GATA2 Guide RNA
gugggcagaaagaucagggu

SEQ ID NO: 34511 - RNA, 20 nt, Artificial Sequence
  GATA2 Guide RNA
gugggguauuauguuucugg

SEQ ID NO: 34512 - RNA, 20 nt, Artificial Sequence
  GATA2 Guide RNA
gugggguuccuucuaugcca

SEQ ID NO: 34513 - RNA, 20 nt, Artificial Sequence
  GATA2 Guide RNA
gugggucccagacccucccc

SEQ ID NO: 34514 - RNA, 20 nt, Artificial Sequence
  GATA2 Guide RNA
guucccuguagggucugucc

SEQ ID NO: 34515 - RNA, 20 nt, Artificial Sequence
  GATA2 Guide RNA
guuccuucuaugccacuugu

SEQ ID NO: 34516 - RNA, 20 nt, Artificial Sequence
  GATA2 Guide RNA
guucugggagucgugaucuc

SEQ ID NO: 34517 - RNA, 20 nt, Artificial Sequence
  GATA2 Guide RNA
guuucugcccacuuccagcu

SEQ ID NO: 34518 - RNA, 20 nt, Artificial Sequence
  GATA2 Guide RNA
guuucuggcuuucuuugggg

SEQ ID NO: 34519 - RNA, 20 nt, Artificial Sequence
  GATA2 Guide RNA
uaauaaucaggaaugucagu

SEQ ID NO: 34520 - RNA, 20 nt, Artificial Sequence
  GATA2 Guide RNA
uaauaccccaccgguaauaa

SEQ ID NO: 34521 - RNA, 20 nt, Artificial Sequence
  GATA2 Guide RNA
uaaucaggaaugucagucca

SEQ ID NO: 34522 - RNA, 20 nt, Artificial Sequence
  GATA2 Guide RNA
uacagggaacccucacaggc

SEQ ID NO: 34523 - RNA, 20 nt, Artificial Sequence
  GATA2 Guide RNA
uaccccaccgguaauaauca

SEQ ID NO: 34524 - RNA, 20 nt, Artificial Sequence
  GATA2 Guide RNA
uacccugaucuuucugccca

SEQ ID NO: 34525 - RNA, 20 nt, Artificial Sequence
  GATA2 Guide RNA
uaccggugggguauuauguu

SEQ ID NO: 34526 - RNA, 20 nt, Artificial Sequence
  GATA2 Guide RNA
uagaaggaaccccaccggac

SEQ ID NO: 34527 - RNA, 20 nt, Artificial Sequence
  GATA2 Guide RNA
uagcucugccuacccugauc

SEQ ID NO: 34528 - RNA, 20 nt, Artificial Sequence
  GATA2 Guide RNA
uaggcagagcuagggacgcc

SEQ ID NO: 34529 - RNA, 20 nt, Artificial Sequence
  GATA2 Guide RNA
uagggacgccccugacagac

SEQ ID NO: 34530 - RNA, 20 nt, Artificial Sequence
  GATA2 Guide RNA
uagggucuguccgguggggu

SEQ ID NO: 34531 - RNA, 20 nt, Artificial Sequence
  GATA2 Guide RNA
uaugccacuuguccuucagc

SEQ ID NO: 34532 - RNA, 20 nt, Artificial Sequence
  GATA2 Guide RNA
uauguuucuggcuuucuuug

SEQ ID NO: 34533 - RNA, 20 nt, Artificial Sequence
  GATA2 Guide RNA
uauuaccggugggguauuau

SEQ ID NO: 34534 - RNA, 20 nt, Artificial Sequence
  GATA2 Guide RNA
uauuauguuucuggcuuucu

SEQ ID NO: 34535 - RNA, 20 nt, Artificial Sequence
  GATA2 Guide RNA
ucaaugucugucaggggcgu

SEQ ID NO: 34536 - RNA, 20 nt, Artificial Sequence
  GATA2 Guide RNA
ucacaggccagcuggaagug

SEQ ID NO: 34537 - RNA, 20 nt, Artificial Sequence
  GATA2 Guide RNA
ucacgacucccagaaccagc

SEQ ID NO: 34538 - RNA, 20 nt, Artificial Sequence
  GATA2 Guide RNA
ucagcuuggacugacauucc

SEQ ID NO: 34539 - RNA, 20 nt, Artificial Sequence
  GATA2 Guide RNA
ucaggaaugucaguccaagc

SEQ ID NO: 34540 - RNA, 20 nt, Artificial Sequence
  GATA2 Guide RNA
ucaggggcgucccuagcucu

SEQ ID NO: 34541 - RNA, 20 nt, Artificial Sequence
  GATA2 Guide RNA
ucaggguaggcagagcuagg

SEQ ID NO: 34542 - RNA, 20 nt, Artificial Sequence
  GATA2 Guide RNA
ucagggugggcagaaagauc

SEQ ID NO: 34543 - RNA, 20 nt, Artificial Sequence
  GATA2 Guide RNA
ucaguccaagcugaaggaca

SEQ ID NO: 34544 - RNA, 20 nt, Artificial Sequence
  GATA2 Guide RNA
ucauccccuccccaaagaaa

SEQ ID NO: 34545 - RNA, 20 nt, Artificial Sequence
  GATA2 Guide RNA
uccaagcugaaggacaagug

SEQ ID NO: 34546 - RNA, 20 nt, Artificial Sequence
  GATA2 Guide RNA
uccagcuggccugugagggu

SEQ ID NO: 34547 - RNA, 20 nt, Artificial Sequence
  GATA2 Guide RNA
ucccagaaccagcagucauc

SEQ ID NO: 34548 - RNA, 20 nt, Artificial Sequence
  GATA2 Guide RNA
ucccagacccuccccaaucg

SEQ ID NO: 34549 - RNA, 20 nt, Artificial Sequence
  GATA2 Guide RNA
uccccaaagaaagccagaaa

SEQ ID NO: 34550 - RNA, 20 nt, Artificial Sequence
  GATA2 Guide RNA
uccccaaucggccgcugcuc

SEQ ID NO: 34551 - RNA, 20 nt, Artificial Sequence
  GATA2 Guide RNA
uccccuccccaaagaaagcc

SEQ ID NO: 34552 - RNA, 20 nt, Artificial Sequence
  GATA2 Guide RNA
ucccuagcucugccuacccu

SEQ ID NO: 34553 - RNA, 20 nt, Artificial Sequence
  GATA2 Guide RNA
ucccuguagggucuguccgg

SEQ ID NO: 34554 - RNA, 20 nt, Artificial Sequence
  GATA2 Guide RNA
uccggugggguuccuucuau

SEQ ID NO: 34555 - RNA, 20 nt, Artificial Sequence
  GATA2 Guide RNA
uccugauuauuaccgguggg

SEQ ID NO: 34556 - RNA, 20 nt, Artificial Sequence
  GATA2 Guide RNA
uccuucagcuuggacugaca

SEQ ID NO: 34557 - RNA, 20 nt, Artificial Sequence
  GATA2 Guide RNA
uccuucuaugccacuugucc

SEQ ID NO: 34558 - RNA, 20 nt, Artificial Sequence
  GATA2 Guide RNA
ucggccgcugcucccaccuc

SEQ ID NO: 34559 - RNA, 20 nt, Artificial Sequence
  GATA2 Guide RNA
ucgugaucucaaugucuguc

SEQ ID NO: 34560 - RNA, 20 nt, Artificial Sequence
  GATA2 Guide RNA
ucuaugccacuuguccuuca

SEQ ID NO: 34561 - RNA, 20 nt, Artificial Sequence
  GATA2 Guide RNA
ucucaaugucugucaggggc

SEQ ID NO: 34562 - RNA, 20 nt, Artificial Sequence
  GATA2 Guide RNA
ucugcccacccugauccucu

SEQ ID NO: 34563 - RNA, 20 nt, Artificial Sequence
  GATA2 Guide RNA
ucugcccacuuccagcuggc

SEQ ID NO: 34564 - RNA, 20 nt, Artificial Sequence
  GATA2 Guide RNA
ucugccuacccugaucuuuc

SEQ ID NO: 34565 - RNA, 20 nt, Artificial Sequence
  GATA2 Guide RNA
ucuggcuuucuuuggggagg

SEQ ID NO: 34566 - RNA, 20 nt, Artificial Sequence
  GATA2 Guide RNA
ucugggacccacaggguuuc

SEQ ID NO: 34567 - RNA, 20 nt, Artificial Sequence
  GATA2 Guide RNA
ucugggagucgugaucucaa

SEQ ID NO: 34568 - RNA, 20 nt, Artificial Sequence
  GATA2 Guide RNA
ucugucaggggcgucccuag

SEQ ID NO: 34569 - RNA, 20 nt, Artificial Sequence
  GATA2 Guide RNA
ucuguccggugggguuccuu

SEQ ID NO: 34570 - RNA, 20 nt, Artificial Sequence
  GATA2 Guide RNA
ucuuucugcccacccugauc

SEQ ID NO: 34571 - RNA, 20 nt, Artificial Sequence
  GATA2 Guide RNA
ucuuuggggaggggaugacu

SEQ ID NO: 34572 - RNA, 20 nt, Artificial Sequence
  GATA2 Guide RNA
ugaaggacaaguggcauaga

SEQ ID NO: 34573 - RNA, 20 nt, Artificial Sequence
  GATA2 Guide RNA
ugacagacauugagaucacg

SEQ ID NO: 34574 - RNA, 20 nt, Artificial Sequence
  GATA2 Guide RNA
ugacauuccugauuauuacc

SEQ ID NO: 34575 - RNA, 20 nt, Artificial Sequence
  GATA2 Guide RNA
ugacugcugguucugggagu

SEQ ID NO: 34576 - RNA, 20 nt, Artificial Sequence
  GATA2 Guide RNA
ugagaucacgacucccagaa

SEQ ID NO: 34577 - RNA, 20 nt, Artificial Sequence
  GATA2 Guide RNA
ugaggguucccuguaggguc

SEQ ID NO: 34578 - RNA, 20 nt, Artificial Sequence
  GATA2 Guide RNA
ugaucucaaugucugucagg

SEQ ID NO: 34579 - RNA, 20 nt, Artificial Sequence
  GATA2 Guide RNA
ugaucuuucugcccacccug

SEQ ID NO: 34580 - RNA, 20 nt, Artificial Sequence
  GATA2 Guide RNA
ugauuauuaccgguggggua

SEQ ID NO: 34581 - RNA, 20 nt, Artificial Sequence
  GATA2 Guide RNA
ugccacuuguccuucagcuu

SEQ ID NO: 34582 - RNA, 20 nt, Artificial Sequence
  GATA2 Guide RNA
ugcccacccugauccucucu

SEQ ID NO: 34583 - RNA, 20 nt, Artificial Sequence
  GATA2 Guide RNA
ugcccacuuccagcuggccu

SEQ ID NO: 34584 - RNA, 20 nt, Artificial Sequence
  GATA2 Guide RNA
ugccuacccugaucuuucug

SEQ ID NO: 34585 - RNA, 20 nt, Artificial Sequence
  GATA2 Guide RNA
ugcugguucugggagucgug

SEQ ID NO: 34586 - RNA, 20 nt, Artificial Sequence
  GATA2 Guide RNA
uggaagugggcagaaacccu

SEQ ID NO: 34587 - RNA, 20 nt, Artificial Sequence
  GATA2 Guide RNA
uggacugacauuccugauua

SEQ ID NO: 34588 - RNA, 20 nt, Artificial Sequence
  GATA2 Guide RNA
uggcauagaaggaaccccac

SEQ ID NO: 34589 - RNA, 20 nt, Artificial Sequence
  GATA2 Guide RNA
uggccugugaggguucccug

SEQ ID NO: 34590 - RNA, 20 nt, Artificial Sequence
  GATA2 Guide RNA
uggcuuucuuuggggagggg

SEQ ID NO: 34591 - RNA, 20 nt, Artificial Sequence
  GATA2 Guide RNA
ugggacccacaggguuucug

SEQ ID NO: 34592 - RNA, 20 nt, Artificial Sequence
  GATA2 Guide RNA
ugggagcagcggccgauugg

SEQ ID NO: 34593 - RNA, 20 nt, Artificial Sequence
  GATA2 Guide RNA
ugggagucgugaucucaaug

SEQ ID NO: 34594 - RNA, 20 nt, Artificial Sequence
  GATA2 Guide RNA
ugggcagaaacccugugggu

SEQ ID NO: 34595 - RNA, 20 nt, Artificial Sequence
  GATA2 Guide RNA
ugggcagaaagaucagggua

SEQ ID NO: 34596 - RNA, 20 nt, Artificial Sequence
  GATA2 Guide RNA
uggggaggggaugacugcug

SEQ ID NO: 34597 - RNA, 20 nt, Artificial Sequence
  GATA2 Guide RNA
uggggagggucugggaccca

SEQ ID NO: 34598 - RNA, 20 nt, Artificial Sequence
  GATA2 Guide RNA
ugggguauuauguuucuggc

SEQ ID NO: 34599 - RNA, 20 nt, Artificial Sequence
  GATA2 Guide RNA
ugggguuccuucuaugccac

SEQ ID NO: 34600 - RNA, 20 nt, Artificial Sequence
  GATA2 Guide RNA
ugggucccagacccucccca

SEQ ID NO: 34601 - RNA, 20 nt, Artificial Sequence
  GATA2 Guide RNA
ugguucugggagucgugauc

SEQ ID NO: 34602 - RNA, 20 nt, Artificial Sequence
  GATA2 Guide RNA
uguagggucuguccgguggg

SEQ ID NO: 34603 - RNA, 20 nt, Artificial Sequence
  GATA2 Guide RNA
ugucaggggcgucccuagcu

SEQ ID NO: 34604 - RNA, 20 nt, Artificial Sequence
  GATA2 Guide RNA
ugucaguccaagcugaagga

SEQ ID NO: 34605 - RNA, 20 nt, Artificial Sequence
  GATA2 Guide RNA
uguccggugggguuccuucu

SEQ ID NO: 34606 - RNA, 20 nt, Artificial Sequence
  GATA2 Guide RNA
uguccuucagcuuggacuga

SEQ ID NO: 34607 - RNA, 20 nt, Artificial Sequence
  GATA2 Guide RNA
ugucugucaggggcgucccu

SEQ ID NO: 34608 - RNA, 20 nt, Artificial Sequence
  GATA2 Guide RNA
ugugaggguucccuguaggg

SEQ ID NO: 34609 - RNA, 20 nt, Artificial Sequence
  GATA2 Guide RNA
ugugggucccagacccuccc

SEQ ID NO: 34610 - RNA, 20 nt, Artificial Sequence
  GATA2 Guide RNA
uguuucuggcuuucuuuggg

SEQ ID NO: 34611 - RNA, 20 nt, Artificial Sequence
  GATA2 Guide RNA
uuaccggugggguauuaugu

SEQ ID NO: 34612 - RNA, 20 nt, Artificial Sequence
  GATA2 Guide RNA
uuauguuucuggcuuucuuu

SEQ ID NO: 34613 - RNA, 20 nt, Artificial Sequence
  GATA2 Guide RNA
uuauuaccggugggguauua

SEQ ID NO: 34614 - RNA, 20 nt, Artificial Sequence
  GATA2 Guide RNA
uucagcuuggacugacauuc

SEQ ID NO: 34615 - RNA, 20 nt, Artificial Sequence
  GATA2 Guide RNA
uuccagcuggccugugaggg

SEQ ID NO: 34616 - RNA, 20 nt, Artificial Sequence
  GATA2 Guide RNA
uucccuguagggucuguccg

SEQ ID NO: 34617 - RNA, 20 nt, Artificial Sequence
  GATA2 Guide RNA
uuccugauuauuaccggugg

SEQ ID NO: 34618 - RNA, 20 nt, Artificial Sequence
  GATA2 Guide RNA
uuccuucuaugccacuuguc

SEQ ID NO: 34619 - RNA, 20 nt, Artificial Sequence
  GATA2 Guide RNA
uucuaugccacuuguccuuc

SEQ ID NO: 34620 - RNA, 20 nt, Artificial Sequence
  GATA2 Guide RNA
uucugcccacccugauccuc

SEQ ID NO: 34621 - RNA, 20 nt, Artificial Sequence
  GATA2 Guide RNA
uucugcccacuuccagcugg

SEQ ID NO: 34622 - RNA, 20 nt, Artificial Sequence
  GATA2 Guide RNA
uucuggcuuucuuuggggag

SEQ ID NO: 34623 - RNA, 20 nt, Artificial Sequence
  GATA2 Guide RNA
uucugggagucgugaucuca

SEQ ID NO: 34624 - RNA, 20 nt, Artificial Sequence
  GATA2 Guide RNA
uucuuuggggaggggaugac

SEQ ID NO: 34625 - RNA, 20 nt, Artificial Sequence
  GATA2 Guide RNA
uugagaucacgacucccaga

SEQ ID NO: 34626 - RNA, 20 nt, Artificial Sequence
  GATA2 Guide RNA
uuggacugacauuccugauu

SEQ ID NO: 34627 - RNA, 20 nt, Artificial Sequence
  GATA2 Guide RNA
uuggggaggggaugacugcu

SEQ ID NO: 34628 - RNA, 20 nt, Artificial Sequence
  GATA2 Guide RNA
uuggggagggucugggaccc

SEQ ID NO: 34629 - RNA, 20 nt, Artificial Sequence
  GATA2 Guide RNA
uuguccuucagcuuggacug

SEQ ID NO: 34630 - RNA, 20 nt, Artificial Sequence
  GATA2 Guide RNA
uuucugcccacccugauccu

SEQ ID NO: 34631 - RNA, 20 nt, Artificial Sequence
  GATA2 Guide RNA
uuucugcccacuuccagcug

SEQ ID NO: 34632 - RNA, 20 nt, Artificial Sequence
  GATA2 Guide RNA
uuucuggcuuucuuugggga

SEQ ID NO: 34633 - RNA, 20 nt, Artificial Sequence
  GATA2 Guide RNA
uuucuuuggggaggggauga

SEQ ID NO: 34634 - RNA, 20 nt, Artificial Sequence
  GATA2 Guide RNA
uuuggggaggggaugacugc

SEQ ID NO: 34635 - RNA, 21 nt, Artificial Sequence
  GATA2 Guide RNA
aaacauaauaccccaccggua

SEQ ID NO: 34636 - RNA, 21 nt, Artificial Sequence
  GATA2 Guide RNA
aaacccugugggucccagacc

SEQ ID NO: 34637 - RNA, 21 nt, Artificial Sequence
  GATA2 Guide RNA
aaagagagagaggaucagggu

SEQ ID NO: 34638 - RNA, 21 nt, Artificial Sequence
  GATA2 Guide RNA
aaagaucaggguaggcagagc

SEQ ID NO: 34639 - RNA, 21 nt, Artificial Sequence
  GATA2 Guide RNA
aaagccagaaacauaauaccc

SEQ ID NO: 34640 - RNA, 21 nt, Artificial Sequence
  GATA2 Guide RNA
aacauaauaccccaccgguaa

SEQ ID NO: 34641 - RNA, 21 nt, Artificial Sequence
  GATA2 Guide RNA
aaccagcagucauccccuccc

SEQ ID NO: 34642 - RNA, 21 nt, Artificial Sequence
  GATA2 Guide RNA
aaccccaccggacagacccua

SEQ ID NO: 34643 - RNA, 21 nt, Artificial Sequence
  GATA2 Guide RNA
aacccucacaggccagcugga

SEQ ID NO: 34644 - RNA, 21 nt, Artificial Sequence
  GATA2 Guide RNA
aacccugugggucccagaccc

SEQ ID NO: 34645 - RNA, 21 nt, Artificial Sequence
  GATA2 Guide RNA
aagagagagaggaucagggug

SEQ ID NO: 34646 - RNA, 21 nt, Artificial Sequence
  GATA2 Guide RNA
aagaucaggguaggcagagcu

SEQ ID NO: 34647 - RNA, 21 nt, Artificial Sequence
  GATA2 Guide RNA
aagccagaaacauaauacccc

SEQ ID NO: 34648 - RNA, 21 nt, Artificial Sequence
  GATA2 Guide RNA
aagcugaaggacaaguggcau

SEQ ID NO: 34649 - RNA, 21 nt, Artificial Sequence
  GATA2 Guide RNA
aaggaaccccaccggacagac

SEQ ID NO: 34650 - RNA, 21 nt, Artificial Sequence
  GATA2 Guide RNA
aaggacaaguggcauagaagg

SEQ ID NO: 34651 - RNA, 21 nt, Artificial Sequence
  GATA2 Guide RNA
aaguggcauagaaggaacccc

SEQ ID NO: 34652 - RNA, 21 nt, Artificial Sequence
  GATA2 Guide RNA
aagugggcagaaacccugugg

SEQ ID NO: 34653 - RNA, 21 nt, Artificial Sequence
  GATA2 Guide RNA
aauaaucaggaaugucagucc

SEQ ID NO: 34654 - RNA, 21 nt, Artificial Sequence
  GATA2 Guide RNA
aauaccccaccgguaauaauc

SEQ ID NO: 34655 - RNA, 21 nt, Artificial Sequence
  GATA2 Guide RNA
aaucaggaaugucaguccaag

SEQ ID NO: 34656 - RNA, 21 nt, Artificial Sequence
  GATA2 Guide RNA
aaucggccgcugcucccaccu

SEQ ID NO: 34657 - RNA, 21 nt, Artificial Sequence
  GATA2 Guide RNA
aaugucaguccaagcugaagg

SEQ ID NO: 34658 - RNA, 21 nt, Artificial Sequence
  GATA2 Guide RNA
aaugucugucaggggcguccc

SEQ ID NO: 34659 - RNA, 21 nt, Artificial Sequence
  GATA2 Guide RNA
acaaguggcauagaaggaacc

SEQ ID NO: 34660 - RNA, 21 nt, Artificial Sequence
  GATA2 Guide RNA
acagacauugagaucacgacu

SEQ ID NO: 34661 - RNA, 21 nt, Artificial Sequence
  GATA2 Guide RNA
acagacccuacagggaacccu

SEQ ID NO: 34662 - RNA, 21 nt, Artificial Sequence
  GATA2 Guide RNA
acaggccagcuggaagugggc

SEQ ID NO: 34663 - RNA, 21 nt, Artificial Sequence
  GATA2 Guide RNA
acagggaacccucacaggcca

SEQ ID NO: 34664 - RNA, 21 nt, Artificial Sequence
  GATA2 Guide RNA
acaggguuucugcccacuucc

SEQ ID NO: 34665 - RNA, 21 nt, Artificial Sequence
  GATA2 Guide RNA
acauaauaccccaccgguaau

SEQ ID NO: 34666 - RNA, 21 nt, Artificial Sequence
  GATA2 Guide RNA
acauuccugauuauuaccggu

SEQ ID NO: 34667 - RNA, 21 nt, Artificial Sequence
  GATA2 Guide RNA
acauugagaucacgacuccca

SEQ ID NO: 34668 - RNA, 21 nt, Artificial Sequence
  GATA2 Guide RNA
accagcagucauccccucccc

SEQ ID NO: 34669 - RNA, 21 nt, Artificial Sequence
  GATA2 Guide RNA
acccacaggguuucugcccac

SEQ ID NO: 34670 - RNA, 21 nt, Artificial Sequence
  GATA2 Guide RNA
accccaccggacagacccuac

SEQ ID NO: 34671 - RNA, 21 nt, Artificial Sequence
  GATA2 Guide RNA
accccaccgguaauaaucagg

SEQ ID NO: 34672 - RNA, 21 nt, Artificial Sequence
  GATA2 Guide RNA
acccuacagggaacccucaca

SEQ ID NO: 34673 - RNA, 21 nt, Artificial Sequence
  GATA2 Guide RNA
acccucacaggccagcuggaa

SEQ ID NO: 34674 - RNA, 21 nt, Artificial Sequence
  GATA2 Guide RNA
acccuccccaaucggccgcug

SEQ ID NO: 34675 - RNA, 21 nt, Artificial Sequence
  GATA2 Guide RNA
acccugauccucucucucuuu

SEQ ID NO: 34676 - RNA, 21 nt, Artificial Sequence
  GATA2 Guide RNA
acccugaucuuucugcccacc

SEQ ID NO: 34677 - RNA, 21 nt, Artificial Sequence
  GATA2 Guide RNA
acccugugggucccagacccu

SEQ ID NO: 34678 - RNA, 21 nt, Artificial Sequence
  GATA2 Guide RNA
accggacagacccuacaggga

SEQ ID NO: 34679 - RNA, 21 nt, Artificial Sequence
  GATA2 Guide RNA
accgguaauaaucaggaaugu

SEQ ID NO: 34680 - RNA, 21 nt, Artificial Sequence
  GATA2 Guide RNA
accggugggguauuauguuuc

SEQ ID NO: 34681 - RNA, 21 nt, Artificial Sequence
  GATA2 Guide RNA
acgacucccagaaccagcagu

SEQ ID NO: 34682 - RNA, 21 nt, Artificial Sequence
  GATA2 Guide RNA
acgccccugacagacauugag

SEQ ID NO: 34683 - RNA, 21 nt, Artificial Sequence
  GATA2 Guide RNA
acucccagaaccagcagucau

SEQ ID NO: 34684 - RNA, 21 nt, Artificial Sequence
  GATA2 Guide RNA
acugacauuccugauuauuac

SEQ ID NO: 34685 - RNA, 21 nt, Artificial Sequence
  GATA2 Guide RNA
acugcugguucugggagucgu

SEQ ID NO: 34686 - RNA, 21 nt, Artificial Sequence
  GATA2 Guide RNA
acuuccagcuggccugugagg

SEQ ID NO: 34687 - RNA, 21 nt, Artificial Sequence
  GATA2 Guide RNA
acuuguccuucagcuuggacu

SEQ ID NO: 34688 - RNA, 21 nt, Artificial Sequence
  GATA2 Guide RNA
agaaacauaauaccccaccgg

SEQ ID NO: 34689 - RNA, 21 nt, Artificial Sequence
  GATA2 Guide RNA
agaaacccugugggucccaga

SEQ ID NO: 34690 - RNA, 21 nt, Artificial Sequence
  GATA2 Guide RNA
agaaagaucaggguaggcaga

SEQ ID NO: 34691 - RNA, 21 nt, Artificial Sequence
  GATA2 Guide RNA
agaaagccagaaacauaauac

SEQ ID NO: 34692 - RNA, 21 nt, Artificial Sequence
  GATA2 Guide RNA
agaaccagcagucauccccuc

SEQ ID NO: 34693 - RNA, 21 nt, Artificial Sequence
  GATA2 Guide RNA
agaaggaaccccaccggacag

SEQ ID NO: 34694 - RNA, 21 nt, Artificial Sequence
  GATA2 Guide RNA
agacauugagaucacgacucc

SEQ ID NO: 34695 - RNA, 21 nt, Artificial Sequence
  GATA2 Guide RNA
agacccuacagggaacccuca

SEQ ID NO: 34696 - RNA, 21 nt, Artificial Sequence
  GATA2 Guide RNA
agacccuccccaaucggccgc

SEQ ID NO: 34697 - RNA, 21 nt, Artificial Sequence
  GATA2 Guide RNA
agagagagaggaucagggugg

SEQ ID NO: 34698 - RNA, 21 nt, Artificial Sequence
  GATA2 Guide RNA
agagagaggaucagggugggc

SEQ ID NO: 34699 - RNA, 21 nt, Artificial Sequence
  GATA2 Guide RNA
agagaggaucagggugggcag

SEQ ID NO: 34700 - RNA, 21 nt, Artificial Sequence
  GATA2 Guide RNA
agagcuagggacgccccugac

SEQ ID NO: 34701 - RNA, 21 nt, Artificial Sequence
  GATA2 Guide RNA
agaggaucagggugggcagaa

SEQ ID NO: 34702 - RNA, 21 nt, Artificial Sequence
  GATA2 Guide RNA
agaggugggagcagcggccga

SEQ ID NO: 34703 - RNA, 21 nt, Artificial Sequence
  GATA2 Guide RNA
agaucacgacucccagaacca

SEQ ID NO: 34704 - RNA, 21 nt, Artificial Sequence
  GATA2 Guide RNA
agaucaggguaggcagagcua

SEQ ID NO: 34705 - RNA, 21 nt, Artificial Sequence
  GATA2 Guide RNA
agcagcggccgauuggggagg

SEQ ID NO: 34706 - RNA, 21 nt, Artificial Sequence
  GATA2 Guide RNA
agcagucauccccuccccaaa

SEQ ID NO: 34707 - RNA, 21 nt, Artificial Sequence
  GATA2 Guide RNA
agccagaaacauaauacccca

SEQ ID NO: 34708 - RNA, 21 nt, Artificial Sequence
  GATA2 Guide RNA
agcggccgauuggggaggguc

SEQ ID NO: 34709 - RNA, 21 nt, Artificial Sequence
  GATA2 Guide RNA
agcuagggacgccccugacag

SEQ ID NO: 34710 - RNA, 21 nt, Artificial Sequence
  GATA2 Guide RNA
agcucugccuacccugaucuu

SEQ ID NO: 34711 - RNA, 21 nt, Artificial Sequence
  GATA2 Guide RNA
agcugaaggacaaguggcaua

SEQ ID NO: 34712 - RNA, 21 nt, Artificial Sequence
  GATA2 Guide RNA
agcuggaagugggcagaaacc

SEQ ID NO: 34713 - RNA, 21 nt, Artificial Sequence
  GATA2 Guide RNA
agcuggccugugaggguuccc

SEQ ID NO: 34714 - RNA, 21 nt, Artificial Sequence
  GATA2 Guide RNA
agcuuggacugacauuccuga

SEQ ID NO: 34715 - RNA, 21 nt, Artificial Sequence
  GATA2 Guide RNA
aggaaccccaccggacagacc

SEQ ID NO: 34716 - RNA, 21 nt, Artificial Sequence
  GATA2 Guide RNA
aggaaugucaguccaagcuga

SEQ ID NO: 34717 - RNA, 21 nt, Artificial Sequence
  GATA2 Guide RNA
aggacaaguggcauagaagga

SEQ ID NO: 34718 - RNA, 21 nt, Artificial Sequence
  GATA2 Guide RNA
aggaucagggugggcagaaag

SEQ ID NO: 34719 - RNA, 21 nt, Artificial Sequence
  GATA2 Guide RNA
aggcagagcuagggacgcccc

SEQ ID NO: 34720 - RNA, 21 nt, Artificial Sequence
  GATA2 Guide RNA
aggccagcuggaagugggcag

SEQ ID NO: 34721 - RNA, 21 nt, Artificial Sequence
  GATA2 Guide RNA
agggaacccucacaggccagc

SEQ ID NO: 34722 - RNA, 21 nt, Artificial Sequence
  GATA2 Guide RNA
agggacgccccugacagacau

SEQ ID NO: 34723 - RNA, 21 nt, Artificial Sequence
  GATA2 Guide RNA
aggggaugacugcugguucug

SEQ ID NO: 34724 - RNA, 21 nt, Artificial Sequence
  GATA2 Guide RNA
aggggcgucccuagcucugcc

SEQ ID NO: 34725 - RNA, 21 nt, Artificial Sequence
  GATA2 Guide RNA
aggguaggcagagcuagggac

SEQ ID NO: 34726 - RNA, 21 nt, Artificial Sequence
  GATA2 Guide RNA
agggucugggacccacagggu

SEQ ID NO: 34727 - RNA, 21 nt, Artificial Sequence
  GATA2 Guide RNA
agggucuguccggugggguuc

SEQ ID NO: 34728 - RNA, 21 nt, Artificial Sequence
  GATA2 Guide RNA
agggugggcagaaagaucagg

SEQ ID NO: 34729 - RNA, 21 nt, Artificial Sequence
  GATA2 Guide RNA
aggguucccuguagggucugu

SEQ ID NO: 34730 - RNA, 21 nt, Artificial Sequence
  GATA2 Guide RNA
aggguuucugcccacuuccag

SEQ ID NO: 34731 - RNA, 21 nt, Artificial Sequence
  GATA2 Guide RNA
aggugggagcagcggccgauu

SEQ ID NO: 34732 - RNA, 21 nt, Artificial Sequence
  GATA2 Guide RNA
agucauccccuccccaaagaa

SEQ ID NO: 34733 - RNA, 21 nt, Artificial Sequence
  GATA2 Guide RNA
aguccaagcugaaggacaagu

SEQ ID NO: 34734 - RNA, 21 nt, Artificial Sequence
  GATA2 Guide RNA
agucgugaucucaaugucugu

SEQ ID NO: 34735 - RNA, 21 nt, Artificial Sequence
  GATA2 Guide RNA
aguggcauagaaggaacccca

SEQ ID NO: 34736 - RNA, 21 nt, Artificial Sequence
  GATA2 Guide RNA
agugggcagaaacccuguggg

SEQ ID NO: 34737 - RNA, 21 nt, Artificial Sequence
  GATA2 Guide RNA
auaauaccccaccgguaauaa

SEQ ID NO: 34738 - RNA, 21 nt, Artificial Sequence
  GATA2 Guide RNA
auaaucaggaaugucagucca

SEQ ID NO: 34739 - RNA, 21 nt, Artificial Sequence
  GATA2 Guide RNA
auaccccaccgguaauaauca

SEQ ID NO: 34740 - RNA, 21 nt, Artificial Sequence
  GATA2 Guide RNA
auagaaggaaccccaccggac

SEQ ID NO: 34741 - RNA, 21 nt, Artificial Sequence
  GATA2 Guide RNA
aucacgacucccagaaccagc

SEQ ID NO: 34742 - RNA, 21 nt, Artificial Sequence
  GATA2 Guide RNA
aucaggaaugucaguccaagc

SEQ ID NO: 34743 - RNA, 21 nt, Artificial Sequence
  GATA2 Guide RNA
aucaggguaggcagagcuagg

SEQ ID NO: 34744 - RNA, 21 nt, Artificial Sequence
  GATA2 Guide RNA
aucagggugggcagaaagauc

SEQ ID NO: 34745 - RNA, 21 nt, Artificial Sequence
  GATA2 Guide RNA
auccccuccccaaagaaagcc

SEQ ID NO: 34746 - RNA, 21 nt, Artificial Sequence
  GATA2 Guide RNA
aucggccgcugcucccaccuc

SEQ ID NO: 34747 - RNA, 21 nt, Artificial Sequence
  GATA2 Guide RNA
aucucaaugucugucaggggc

SEQ ID NO: 34748 - RNA, 21 nt, Artificial Sequence
  GATA2 Guide RNA
aucuuucugcccacccugauc

SEQ ID NO: 34749 - RNA, 21 nt, Artificial Sequence
  GATA2 Guide RNA
augacugcugguucugggagu

SEQ ID NO: 34750 - RNA, 21 nt, Artificial Sequence
  GATA2 Guide RNA
augccacuuguccuucagcuu

SEQ ID NO: 34751 - RNA, 21 nt, Artificial Sequence
  GATA2 Guide RNA
augucaguccaagcugaagga

SEQ ID NO: 34752 - RNA, 21 nt, Artificial Sequence
  GATA2 Guide RNA
augucugucaggggcgucccu

SEQ ID NO: 34753 - RNA, 21 nt, Artificial Sequence
  GATA2 Guide RNA
auguuucuggcuuucuuuggg

SEQ ID NO: 34754 - RNA, 21 nt, Artificial Sequence
  GATA2 Guide RNA
auuaccggugggguauuaugu

SEQ ID NO: 34755 - RNA, 21 nt, Artificial Sequence
  GATA2 Guide RNA
auuauuaccggugggguauua

SEQ ID NO: 34756 - RNA, 21 nt, Artificial Sequence
  GATA2 Guide RNA
auuccugauuauuaccggugg

SEQ ID NO: 34757 - RNA, 21 nt, Artificial Sequence
  GATA2 Guide RNA
auugagaucacgacucccaga

SEQ ID NO: 34758 - RNA, 21 nt, Artificial Sequence
  GATA2 Guide RNA
auuggggagggucugggaccc

SEQ ID NO: 34759 - RNA, 21 nt, Artificial Sequence
  GATA2 Guide RNA
caaagaaagccagaaacauaa

SEQ ID NO: 34760 - RNA, 21 nt, Artificial Sequence
  GATA2 Guide RNA
caaagagagagaggaucaggg

SEQ ID NO: 34761 - RNA, 21 nt, Artificial Sequence
  GATA2 Guide RNA
caagcugaaggacaaguggca

SEQ ID NO: 34762 - RNA, 21 nt, Artificial Sequence
  GATA2 Guide RNA
caaguggcauagaaggaaccc

SEQ ID NO: 34763 - RNA, 21 nt, Artificial Sequence
  GATA2 Guide RNA
caaucggccgcugcucccacc

SEQ ID NO: 34764 - RNA, 21 nt, Artificial Sequence
  GATA2 Guide RNA
caaugucugucaggggcgucc

SEQ ID NO: 34765 - RNA, 21 nt, Artificial Sequence
  GATA2 Guide RNA
cacaggccagcuggaaguggg

SEQ ID NO: 34766 - RNA, 21 nt, Artificial Sequence
  GATA2 Guide RNA
cacaggguuucugcccacuuc

SEQ ID NO: 34767 - RNA, 21 nt, Artificial Sequence
  GATA2 Guide RNA
cacccugauccucucucucuu

SEQ ID NO: 34768 - RNA, 21 nt, Artificial Sequence
  GATA2 Guide RNA
caccggacagacccuacaggg

SEQ ID NO: 34769 - RNA, 21 nt, Artificial Sequence
  GATA2 Guide RNA
caccgguaauaaucaggaaug

SEQ ID NO: 34770 - RNA, 21 nt, Artificial Sequence
  GATA2 Guide RNA
cacgacucccagaaccagcag

SEQ ID NO: 34771 - RNA, 21 nt, Artificial Sequence
  GATA2 Guide RNA
cacuuccagcuggccugugag

SEQ ID NO: 34772 - RNA, 21 nt, Artificial Sequence
  GATA2 Guide RNA
cacuuguccuucagcuuggac

SEQ ID NO: 34773 - RNA, 21 nt, Artificial Sequence
  GATA2 Guide RNA
cagaaacauaauaccccaccg

SEQ ID NO: 34774 - RNA, 21 nt, Artificial Sequence
  GATA2 Guide RNA
cagaaacccugugggucccag

SEQ ID NO: 34775 - RNA, 21 nt, Artificial Sequence
  GATA2 Guide RNA
cagaaagaucaggguaggcag

SEQ ID NO: 34776 - RNA, 21 nt, Artificial Sequence
  GATA2 Guide RNA
cagaaccagcagucauccccu

SEQ ID NO: 34777 - RNA, 21 nt, Artificial Sequence
  GATA2 Guide RNA
cagacauugagaucacgacuc

SEQ ID NO: 34778 - RNA, 21 nt, Artificial Sequence
  GATA2 Guide RNA
cagacccuacagggaacccuc

SEQ ID NO: 34779 - RNA, 21 nt, Artificial Sequence
  GATA2 Guide RNA
cagacccuccccaaucggccg

SEQ ID NO: 34780 - RNA, 21 nt, Artificial Sequence
  GATA2 Guide RNA
cagagcuagggacgccccuga

SEQ ID NO: 34781 - RNA, 21 nt, Artificial Sequence
  GATA2 Guide RNA
cagcagucauccccuccccaa

SEQ ID NO: 34782 - RNA, 21 nt, Artificial Sequence
  GATA2 Guide RNA
cagcggccgauuggggagggu

SEQ ID NO: 34783 - RNA, 21 nt, Artificial Sequence
  GATA2 Guide RNA
cagcuggaagugggcagaaac

SEQ ID NO: 34784 - RNA, 21 nt, Artificial Sequence
  GATA2 Guide RNA
cagcuggccugugaggguucc

SEQ ID NO: 34785 - RNA, 21 nt, Artificial Sequence
  GATA2 Guide RNA
cagcuuggacugacauuccug

SEQ ID NO: 34786 - RNA, 21 nt, Artificial Sequence
  GATA2 Guide RNA
caggaaugucaguccaagcug

SEQ ID NO: 34787 - RNA, 21 nt, Artificial Sequence
  GATA2 Guide RNA
caggccagcuggaagugggca

SEQ ID NO: 34788 - RNA, 21 nt, Artificial Sequence
  GATA2 Guide RNA
cagggaacccucacaggccag

SEQ ID NO: 34789 - RNA, 21 nt, Artificial Sequence
  GATA2 Guide RNA
caggggcgucccuagcucugc

SEQ ID NO: 34790 - RNA, 21 nt, Artificial Sequence
  GATA2 Guide RNA
caggguaggcagagcuaggga

SEQ ID NO: 34791 - RNA, 21 nt, Artificial Sequence
  GATA2 Guide RNA
cagggugggcagaaagaucag

SEQ ID NO: 34792 - RNA, 21 nt, Artificial Sequence
  GATA2 Guide RNA
caggguuucugcccacuucca

SEQ ID NO: 34793 - RNA, 21 nt, Artificial Sequence
  GATA2 Guide RNA
cagucauccccuccccaaaga

SEQ ID NO: 34794 - RNA, 21 nt, Artificial Sequence
  GATA2 Guide RNA
caguccaagcugaaggacaag

SEQ ID NO: 34795 - RNA, 21 nt, Artificial Sequence
  GATA2 Guide RNA
cauaauaccccaccgguaaua

SEQ ID NO: 34796 - RNA, 21 nt, Artificial Sequence
  GATA2 Guide RNA
cauagaaggaaccccaccgga

SEQ ID NO: 34797 - RNA, 21 nt, Artificial Sequence
  GATA2 Guide RNA
cauccccuccccaaagaaagc

SEQ ID NO: 34798 - RNA, 21 nt, Artificial Sequence
  GATA2 Guide RNA
cauuccugauuauuaccggug

SEQ ID NO: 34799 - RNA, 21 nt, Artificial Sequence
  GATA2 Guide RNA
cauugagaucacgacucccag

SEQ ID NO: 34800 - RNA, 21 nt, Artificial Sequence
  GATA2 Guide RNA
ccaaagaaagccagaaacaua

SEQ ID NO: 34801 - RNA, 21 nt, Artificial Sequence
  GATA2 Guide RNA
ccaagcugaaggacaaguggc

SEQ ID NO: 34802 - RNA, 21 nt, Artificial Sequence
  GATA2 Guide RNA
ccaaucggccgcugcucccac

SEQ ID NO: 34803 - RNA, 21 nt, Artificial Sequence
  GATA2 Guide RNA
ccacaggguuucugcccacuu

SEQ ID NO: 34804 - RNA, 21 nt, Artificial Sequence
  GATA2 Guide RNA
ccacccugauccucucucucu

SEQ ID NO: 34805 - RNA, 21 nt, Artificial Sequence
  GATA2 Guide RNA
ccaccggacagacccuacagg

SEQ ID NO: 34806 - RNA, 21 nt, Artificial Sequence
  GATA2 Guide RNA
ccaccgguaauaaucaggaau

SEQ ID NO: 34807 - RNA, 21 nt, Artificial Sequence
  GATA2 Guide RNA
ccacuuccagcuggccuguga

SEQ ID NO: 34808 - RNA, 21 nt, Artificial Sequence
  GATA2 Guide RNA
ccacuuguccuucagcuugga

SEQ ID NO: 34809 - RNA, 21 nt, Artificial Sequence
  GATA2 Guide RNA
ccagaaacauaauaccccacc

SEQ ID NO: 34810 - RNA, 21 nt, Artificial Sequence
  GATA2 Guide RNA
ccagaaccagcagucaucccc

SEQ ID NO: 34811 - RNA, 21 nt, Artificial Sequence
  GATA2 Guide RNA
ccagacccuccccaaucggcc

SEQ ID NO: 34812 - RNA, 21 nt, Artificial Sequence
  GATA2 Guide RNA
ccagcagucauccccucccca

SEQ ID NO: 34813 - RNA, 21 nt, Artificial Sequence
  GATA2 Guide RNA
ccagcuggaagugggcagaaa

SEQ ID NO: 34814 - RNA, 21 nt, Artificial Sequence
  GATA2 Guide RNA
ccagcuggccugugaggguuc

SEQ ID NO: 34815 - RNA, 21 nt, Artificial Sequence
  GATA2 Guide RNA
cccaaagaaagccagaaacau

SEQ ID NO: 34816 - RNA, 21 nt, Artificial Sequence
  GATA2 Guide RNA
cccaaucggccgcugcuccca

SEQ ID NO: 34817 - RNA, 21 nt, Artificial Sequence
  GATA2 Guide RNA
cccacaggguuucugcccacu

SEQ ID NO: 34818 - RNA, 21 nt, Artificial Sequence
  GATA2 Guide RNA
cccacccugauccucucucuc

SEQ ID NO: 34819 - RNA, 21 nt, Artificial Sequence
  GATA2 Guide RNA
cccaccggacagacccuacag

SEQ ID NO: 34820 - RNA, 21 nt, Artificial Sequence
  GATA2 Guide RNA
cccaccgguaauaaucaggaa

SEQ ID NO: 34821 - RNA, 21 nt, Artificial Sequence
  GATA2 Guide RNA
cccacuuccagcuggccugug

SEQ ID NO: 34822 - RNA, 21 nt, Artificial Sequence
  GATA2 Guide RNA
cccagaaccagcagucauccc

SEQ ID NO: 34823 - RNA, 21 nt, Artificial Sequence
  GATA2 Guide RNA
cccagacccuccccaaucggc

SEQ ID NO: 34824 - RNA, 21 nt, Artificial Sequence
  GATA2 Guide RNA
ccccaaagaaagccagaaaca

SEQ ID NO: 34825 - RNA, 21 nt, Artificial Sequence
  GATA2 Guide RNA
ccccaaucggccgcugcuccc

SEQ ID NO: 34826 - RNA, 21 nt, Artificial Sequence
  GATA2 Guide RNA
ccccaccggacagacccuaca

SEQ ID NO: 34827 - RNA, 21 nt, Artificial Sequence
  GATA2 Guide RNA
ccccaccgguaauaaucagga

SEQ ID NO: 34828 - RNA, 21 nt, Artificial Sequence
  GATA2 Guide RNA
ccccuccccaaagaaagccag

SEQ ID NO: 34829 - RNA, 21 nt, Artificial Sequence
  GATA2 Guide RNA
ccccugacagacauugagauc

SEQ ID NO: 34830 - RNA, 21 nt, Artificial Sequence
  GATA2 Guide RNA
cccuacagggaacccucacag

SEQ ID NO: 34831 - RNA, 21 nt, Artificial Sequence
  GATA2 Guide RNA
cccuagcucugccuacccuga

SEQ ID NO: 34832 - RNA, 21 nt, Artificial Sequence
  GATA2 Guide RNA
cccucacaggccagcuggaag

SEQ ID NO: 34833 - RNA, 21 nt, Artificial Sequence
  GATA2 Guide RNA
cccuccccaaagaaagccaga

SEQ ID NO: 34834 - RNA, 21 nt, Artificial Sequence
  GATA2 Guide RNA
cccuccccaaucggccgcugc

SEQ ID NO: 34835 - RNA, 21 nt, Artificial Sequence
  GATA2 Guide RNA
cccugacagacauugagauca

SEQ ID NO: 34836 - RNA, 21 nt, Artificial Sequence
  GATA2 Guide RNA
cccugauccucucucucuuug

SEQ ID NO: 34837 - RNA, 21 nt, Artificial Sequence
  GATA2 Guide RNA
cccugaucuuucugcccaccc

SEQ ID NO: 34838 - RNA, 21 nt, Artificial Sequence
  GATA2 Guide RNA
cccuguagggucuguccggug

SEQ ID NO: 34839 - RNA, 21 nt, Artificial Sequence
  GATA2 Guide RNA
cccugugggucccagacccuc

SEQ ID NO: 34840 - RNA, 21 nt, Artificial Sequence
  GATA2 Guide RNA
ccgauuggggagggucuggga

SEQ ID NO: 34841 - RNA, 21 nt, Artificial Sequence
  GATA2 Guide RNA
ccggacagacccuacagggaa

SEQ ID NO: 34842 - RNA, 21 nt, Artificial Sequence
  GATA2 Guide RNA
ccgguaauaaucaggaauguc

SEQ ID NO: 34843 - RNA, 21 nt, Artificial Sequence
  GATA2 Guide RNA
ccggugggguauuauguuucu

SEQ ID NO: 34844 - RNA, 21 nt, Artificial Sequence
  GATA2 Guide RNA
ccggugggguuccuucuaugc

SEQ ID NO: 34845 - RNA, 21 nt, Artificial Sequence
  GATA2 Guide RNA
ccuacagggaacccucacagg

SEQ ID NO: 34846 - RNA, 21 nt, Artificial Sequence
  GATA2 Guide RNA
ccuacccugaucuuucugccc

SEQ ID NO: 34847 - RNA, 21 nt, Artificial Sequence
  GATA2 Guide RNA
ccuagcucugccuacccugau

SEQ ID NO: 34848 - RNA, 21 nt, Artificial Sequence
  GATA2 Guide RNA
ccucacaggccagcuggaagu

SEQ ID NO: 34849 - RNA, 21 nt, Artificial Sequence
  GATA2 Guide RNA
ccuccccaaagaaagccagaa

SEQ ID NO: 34850 - RNA, 21 nt, Artificial Sequence
  GATA2 Guide RNA
ccuccccaaucggccgcugcu

SEQ ID NO: 34851 - RNA, 21 nt, Artificial Sequence
  GATA2 Guide RNA
ccugacagacauugagaucac

SEQ ID NO: 34852 - RNA, 21 nt, Artificial Sequence
  GATA2 Guide RNA
ccugauccucucucucuuugc

SEQ ID NO: 34853 - RNA, 21 nt, Artificial Sequence
  GATA2 Guide RNA
ccugaucuuucugcccacccu

SEQ ID NO: 34854 - RNA, 21 nt, Artificial Sequence
  GATA2 Guide RNA
ccugauuauuaccgguggggu

SEQ ID NO: 34855 - RNA, 21 nt, Artificial Sequence
  GATA2 Guide RNA
ccuguagggucuguccggugg

SEQ ID NO: 34856 - RNA, 21 nt, Artificial Sequence
  GATA2 Guide RNA
ccugugaggguucccuguagg

SEQ ID NO: 34857 - RNA, 21 nt, Artificial Sequence
  GATA2 Guide RNA
ccugugggucccagacccucc

SEQ ID NO: 34858 - RNA, 21 nt, Artificial Sequence
  GATA2 Guide RNA
ccuucagcuuggacugacauu

SEQ ID NO: 34859 - RNA, 21 nt, Artificial Sequence
  GATA2 Guide RNA
ccuucuaugccacuuguccuu

SEQ ID NO: 34860 - RNA, 21 nt, Artificial Sequence
  GATA2 Guide RNA
cgacucccagaaccagcaguc

SEQ ID NO: 34861 - RNA, 21 nt, Artificial Sequence
  GATA2 Guide RNA
cgauuggggagggucugggac

SEQ ID NO: 34862 - RNA, 21 nt, Artificial Sequence
  GATA2 Guide RNA
cgccccugacagacauugaga

SEQ ID NO: 34863 - RNA, 21 nt, Artificial Sequence
  GATA2 Guide RNA
cggacagacccuacagggaac

SEQ ID NO: 34864 - RNA, 21 nt, Artificial Sequence
  GATA2 Guide RNA
cggccgauuggggagggucug

SEQ ID NO: 34865 - RNA, 21 nt, Artificial Sequence
  GATA2 Guide RNA
cgggcaaagagagagaggauc

SEQ ID NO: 34866 - RNA, 21 nt, Artificial Sequence
  GATA2 Guide RNA
cgguaauaaucaggaauguca

SEQ ID NO: 34867 - RNA, 21 nt, Artificial Sequence
  GATA2 Guide RNA
cggugggguauuauguuucug

SEQ ID NO: 34868 - RNA, 21 nt, Artificial Sequence
  GATA2 Guide RNA
cggugggguuccuucuaugcc

SEQ ID NO: 34869 - RNA, 21 nt, Artificial Sequence
  GATA2 Guide RNA
cgucccuagcucugccuaccc

SEQ ID NO: 34870 - RNA, 21 nt, Artificial Sequence
  GATA2 Guide RNA
cgugaucucaaugucugucag

SEQ ID NO: 34871 - RNA, 21 nt, Artificial Sequence
  GATA2 Guide RNA
cuacagggaacccucacaggc

SEQ ID NO: 34872 - RNA, 21 nt, Artificial Sequence
  GATA2 Guide RNA
cuacccugaucuuucugccca

SEQ ID NO: 34873 - RNA, 21 nt, Artificial Sequence
  GATA2 Guide RNA
cuagcucugccuacccugauc

SEQ ID NO: 34874 - RNA, 21 nt, Artificial Sequence
  GATA2 Guide RNA
cuagggacgccccugacagac

SEQ ID NO: 34875 - RNA, 21 nt, Artificial Sequence
  GATA2 Guide RNA
cuaugccacuuguccuucagc

SEQ ID NO: 34876 - RNA, 21 nt, Artificial Sequence
  GATA2 Guide RNA
cucaaugucugucaggggcgu

SEQ ID NO: 34877 - RNA, 21 nt, Artificial Sequence
  GATA2 Guide RNA
cucacaggccagcuggaagug

SEQ ID NO: 34878 - RNA, 21 nt, Artificial Sequence
  GATA2 Guide RNA
cucccagaaccagcagucauc

SEQ ID NO: 34879 - RNA, 21 nt, Artificial Sequence
  GATA2 Guide RNA
cuccccaaagaaagccagaaa

SEQ ID NO: 34880 - RNA, 21 nt, Artificial Sequence
  GATA2 Guide RNA
cuccccaaucggccgcugcuc

SEQ ID NO: 34881 - RNA, 21 nt, Artificial Sequence
  GATA2 Guide RNA
cucugccuacccugaucuuuc

SEQ ID NO: 34882 - RNA, 21 nt, Artificial Sequence
  GATA2 Guide RNA
cugaaggacaaguggcauaga

SEQ ID NO: 34883 - RNA, 21 nt, Artificial Sequence
  GATA2 Guide RNA
cugacagacauugagaucacg

SEQ ID NO: 34884 - RNA, 21 nt, Artificial Sequence
  GATA2 Guide RNA
cugacauuccugauuauuacc

SEQ ID NO: 34885 - RNA, 21 nt, Artificial Sequence
  GATA2 Guide RNA
cugaucuuucugcccacccug

SEQ ID NO: 34886 - RNA, 21 nt, Artificial Sequence
  GATA2 Guide RNA
cugauuauuaccgguggggua

SEQ ID NO: 34887 - RNA, 21 nt, Artificial Sequence
  GATA2 Guide RNA
cugcccacccugauccucucu

SEQ ID NO: 34888 - RNA, 21 nt, Artificial Sequence
  GATA2 Guide RNA
cugcccacuuccagcuggccu

SEQ ID NO: 34889 - RNA, 21 nt, Artificial Sequence
  GATA2 Guide RNA
cugccuacccugaucuuucug

SEQ ID NO: 34890 - RNA, 21 nt, Artificial Sequence
  GATA2 Guide RNA
cugcugguucugggagucgug

SEQ ID NO: 34891 - RNA, 21 nt, Artificial Sequence
  GATA2 Guide RNA
cuggaagugggcagaaacccu

SEQ ID NO: 34892 - RNA, 21 nt, Artificial Sequence
  GATA2 Guide RNA
cuggccugugaggguucccug

SEQ ID NO: 34893 - RNA, 21 nt, Artificial Sequence
  GATA2 Guide RNA
cuggcuuucuuuggggagggg

SEQ ID NO: 34894 - RNA, 21 nt, Artificial Sequence
  GATA2 Guide RNA
cugggacccacaggguuucug

SEQ ID NO: 34895 - RNA, 21 nt, Artificial Sequence
  GATA2 Guide RNA
cugggagucgugaucucaaug

SEQ ID NO: 34896 - RNA, 21 nt, Artificial Sequence
  GATA2 Guide RNA
cugguucugggagucgugauc

SEQ ID NO: 34897 - RNA, 21 nt, Artificial Sequence
  GATA2 Guide RNA
cuguagggucuguccgguggg

SEQ ID NO: 34898 - RNA, 21 nt, Artificial Sequence
  GATA2 Guide RNA
cugucaggggcgucccuagcu

SEQ ID NO: 34899 - RNA, 21 nt, Artificial Sequence
  GATA2 Guide RNA
cuguccggugggguuccuucu

SEQ ID NO: 34900 - RNA, 21 nt, Artificial Sequence
  GATA2 Guide RNA
cugugaggguucccuguaggg

SEQ ID NO: 34901 - RNA, 21 nt, Artificial Sequence
  GATA2 Guide RNA
cugugggucccagacccuccc

SEQ ID NO: 34902 - RNA, 21 nt, Artificial Sequence
  GATA2 Guide RNA
cuucagcuuggacugacauuc

SEQ ID NO: 34903 - RNA, 21 nt, Artificial Sequence
  GATA2 Guide RNA
cuuccagcuggccugugaggg

SEQ ID NO: 34904 - RNA, 21 nt, Artificial Sequence
  GATA2 Guide RNA
cuucuaugccacuuguccuuc

SEQ ID NO: 34905 - RNA, 21 nt, Artificial Sequence
  GATA2 Guide RNA
cuuggacugacauuccugauu

SEQ ID NO: 34906 - RNA, 21 nt, Artificial Sequence
  GATA2 Guide RNA
cuuguccuucagcuuggacug

SEQ ID NO: 34907 - RNA, 21 nt, Artificial Sequence
  GATA2 Guide RNA
cuuucugcccacccugauccu

SEQ ID NO: 34908 - RNA, 21 nt, Artificial Sequence
  GATA2 Guide RNA
cuuucuuuggggaggggauga

SEQ ID NO: 34909 - RNA, 21 nt, Artificial Sequence
  GATA2 Guide RNA
cuuuggggaggggaugacugc

SEQ ID NO: 34910 - RNA, 21 nt, Artificial Sequence
  GATA2 Guide RNA
gaaacauaauaccccaccggu

SEQ ID NO: 34911 - RNA, 21 nt, Artificial Sequence
  GATA2 Guide RNA
gaaacccugugggucccagac

SEQ ID NO: 34912 - RNA, 21 nt, Artificial Sequence
  GATA2 Guide RNA
gaaagaucaggguaggcagag

SEQ ID NO: 34913 - RNA, 21 nt, Artificial Sequence
  GATA2 Guide RNA
gaaagccagaaacauaauacc

SEQ ID NO: 34914 - RNA, 21 nt, Artificial Sequence
  GATA2 Guide RNA
gaaccagcagucauccccucc

SEQ ID NO: 34915 - RNA, 21 nt, Artificial Sequence
  GATA2 Guide RNA
gaaccccaccggacagacccu

SEQ ID NO: 34916 - RNA, 21 nt, Artificial Sequence
  GATA2 Guide RNA
gaacccucacaggccagcugg

SEQ ID NO: 34917 - RNA, 21 nt, Artificial Sequence
  GATA2 Guide RNA
gaaggaaccccaccggacaga

SEQ ID NO: 34918 - RNA, 21 nt, Artificial Sequence
  GATA2 Guide RNA
gaaggacaaguggcauagaag

SEQ ID NO: 34919 - RNA, 21 nt, Artificial Sequence
  GATA2 Guide RNA
gaagugggcagaaacccugug

SEQ ID NO: 34920 - RNA, 21 nt, Artificial Sequence
  GATA2 Guide RNA
gaaugucaguccaagcugaag

SEQ ID NO: 34921 - RNA, 21 nt, Artificial Sequence
  GATA2 Guide RNA
gacaaguggcauagaaggaac

SEQ ID NO: 34922 - RNA, 21 nt, Artificial Sequence
  GATA2 Guide RNA
gacagacauugagaucacgac

SEQ ID NO: 34923 - RNA, 21 nt, Artificial Sequence
  GATA2 Guide RNA
gacagacccuacagggaaccc

SEQ ID NO: 34924 - RNA, 21 nt, Artificial Sequence
  GATA2 Guide RNA
gacauuccugauuauuaccgg

SEQ ID NO: 34925 - RNA, 21 nt, Artificial Sequence
  GATA2 Guide RNA
gacauugagaucacgacuccc

SEQ ID NO: 34926 - RNA, 21 nt, Artificial Sequence
  GATA2 Guide RNA
gacccacaggguuucugccca

SEQ ID NO: 34927 - RNA, 21 nt, Artificial Sequence
  GATA2 Guide RNA
gacccuacagggaacccucac

SEQ ID NO: 34928 - RNA, 21 nt, Artificial Sequence
  GATA2 Guide RNA
gacccuccccaaucggccgcu

SEQ ID NO: 34929 - RNA, 21 nt, Artificial Sequence
  GATA2 Guide RNA
gacgccccugacagacauuga

SEQ ID NO: 34930 - RNA, 21 nt, Artificial Sequence
  GATA2 Guide RNA
gacucccagaaccagcaguca

SEQ ID NO: 34931 - RNA, 21 nt, Artificial Sequence
  GATA2 Guide RNA
gacugacauuccugauuauua

SEQ ID NO: 34932 - RNA, 21 nt, Artificial Sequence
  GATA2 Guide RNA
gacugcugguucugggagucg

SEQ ID NO: 34933 - RNA, 21 nt, Artificial Sequence
  GATA2 Guide RNA
gagagagaggaucaggguggg

SEQ ID NO: 34934 - RNA, 21 nt, Artificial Sequence
  GATA2 Guide RNA
gagagaggaucagggugggca

SEQ ID NO: 34935 - RNA, 21 nt, Artificial Sequence
  GATA2 Guide RNA
gagaggaucagggugggcaga

SEQ ID NO: 34936 - RNA, 21 nt, Artificial Sequence
  GATA2 Guide RNA
gagaggugggagcagcggccg

SEQ ID NO: 34937 - RNA, 21 nt, Artificial Sequence
  GATA2 Guide RNA
gagaucacgacucccagaacc

SEQ ID NO: 34938 - RNA, 21 nt, Artificial Sequence
  GATA2 Guide RNA
gagcagcggccgauuggggag

SEQ ID NO: 34939 - RNA, 21 nt, Artificial Sequence
  GATA2 Guide RNA
gagcuagggacgccccugaca

SEQ ID NO: 34940 - RNA, 21 nt, Artificial Sequence
  GATA2 Guide RNA
gaggaucagggugggcagaaa

SEQ ID NO: 34941 - RNA, 21 nt, Artificial Sequence
  GATA2 Guide RNA
gaggggaugacugcugguucu

SEQ ID NO: 34942 - RNA, 21 nt, Artificial Sequence
  GATA2 Guide RNA
gagggucugggacccacaggg

SEQ ID NO: 34943 - RNA, 21 nt, Artificial Sequence
  GATA2 Guide RNA
gaggguucccuguagggucug

SEQ ID NO: 34944 - RNA, 21 nt, Artificial Sequence
  GATA2 Guide RNA
gaggugggagcagcggccgau

SEQ ID NO: 34945 - RNA, 21 nt, Artificial Sequence
  GATA2 Guide RNA
gagucgugaucucaaugucug

SEQ ID NO: 34946 - RNA, 21 nt, Artificial Sequence
  GATA2 Guide RNA
gaucacgacucccagaaccag

SEQ ID NO: 34947 - RNA, 21 nt, Artificial Sequence
  GATA2 Guide RNA
gaucaggguaggcagagcuag

SEQ ID NO: 34948 - RNA, 21 nt, Artificial Sequence
  GATA2 Guide RNA
gaucagggugggcagaaagau

SEQ ID NO: 34949 - RNA, 21 nt, Artificial Sequence
  GATA2 Guide RNA
gaucucaaugucugucagggg

SEQ ID NO: 34950 - RNA, 21 nt, Artificial Sequence
  GATA2 Guide RNA
gaucuuucugcccacccugau

SEQ ID NO: 34951 - RNA, 21 nt, Artificial Sequence
  GATA2 Guide RNA
gaugacugcugguucugggag

SEQ ID NO: 34952 - RNA, 21 nt, Artificial Sequence
  GATA2 Guide RNA
gauuauuaccggugggguauu

SEQ ID NO: 34953 - RNA, 21 nt, Artificial Sequence
  GATA2 Guide RNA
gauuggggagggucugggacc

SEQ ID NO: 34954 - RNA, 21 nt, Artificial Sequence
  GATA2 Guide RNA
gcaaagagagagaggaucagg

SEQ ID NO: 34955 - RNA, 21 nt, Artificial Sequence
  GATA2 Guide RNA
gcagaaacccuguggguccca

SEQ ID NO: 34956 - RNA, 21 nt, Artificial Sequence
  GATA2 Guide RNA
gcagaaagaucaggguaggca

SEQ ID NO: 34957 - RNA, 21 nt, Artificial Sequence
  GATA2 Guide RNA
gcagagcuagggacgccccug

SEQ ID NO: 34958 - RNA, 21 nt, Artificial Sequence
  GATA2 Guide RNA
gcagcggccgauuggggaggg

SEQ ID NO: 34959 - RNA, 21 nt, Artificial Sequence
  GATA2 Guide RNA
gcagucauccccuccccaaag

SEQ ID NO: 34960 - RNA, 21 nt, Artificial Sequence
  GATA2 Guide RNA
gcauagaaggaaccccaccgg

SEQ ID NO: 34961 - RNA, 21 nt, Artificial Sequence
  GATA2 Guide RNA
gccacuuguccuucagcuugg

SEQ ID NO: 34962 - RNA, 21 nt, Artificial Sequence
  GATA2 Guide RNA
gccagaaacauaauaccccac

SEQ ID NO: 34963 - RNA, 21 nt, Artificial Sequence
  GATA2 Guide RNA
gccagcuggaagugggcagaa

SEQ ID NO: 34964 - RNA, 21 nt, Artificial Sequence
  GATA2 Guide RNA
gcccacccugauccucucucu

SEQ ID NO: 34965 - RNA, 21 nt, Artificial Sequence
  GATA2 Guide RNA
gcccacuuccagcuggccugu

SEQ ID NO: 34966 - RNA, 21 nt, Artificial Sequence
  GATA2 Guide RNA
gccccugacagacauugagau

SEQ ID NO: 34967 - RNA, 21 nt, Artificial Sequence
  GATA2 Guide RNA
gccgauuggggagggucuggg

SEQ ID NO: 34968 - RNA, 21 nt, Artificial Sequence
  GATA2 Guide RNA
gccuacccugaucuuucugcc

SEQ ID NO: 34969 - RNA, 21 nt, Artificial Sequence
  GATA2 Guide RNA
gccugugaggguucccuguag

SEQ ID NO: 34970 - RNA, 21 nt, Artificial Sequence
  GATA2 Guide RNA
gcggccgauuggggagggucu

SEQ ID NO: 34971 - RNA, 21 nt, Artificial Sequence
  GATA2 Guide RNA
gcgggcaaagagagagaggau

SEQ ID NO: 34972 - RNA, 21 nt, Artificial Sequence
  GATA2 Guide RNA
gcgucccuagcucugccuacc

SEQ ID NO: 34973 - RNA, 21 nt, Artificial Sequence
  GATA2 Guide RNA
gcuagggacgccccugacaga

SEQ ID NO: 34974 - RNA, 21 nt, Artificial Sequence
  GATA2 Guide RNA
gcucugccuacccugaucuuu

SEQ ID NO: 34975 - RNA, 21 nt, Artificial Sequence
  GATA2 Guide RNA
gcugaaggacaaguggcauag

SEQ ID NO: 34976 - RNA, 21 nt, Artificial Sequence
  GATA2 Guide RNA
gcuggaagugggcagaaaccc

SEQ ID NO: 34977 - RNA, 21 nt, Artificial Sequence
  GATA2 Guide RNA
gcuggccugugaggguucccu

SEQ ID NO: 34978 - RNA, 21 nt, Artificial Sequence
  GATA2 Guide RNA
gcugguucugggagucgugau

SEQ ID NO: 34979 - RNA, 21 nt, Artificial Sequence
  GATA2 Guide RNA
gcuuggacugacauuccugau

SEQ ID NO: 34980 - RNA, 21 nt, Artificial Sequence
  GATA2 Guide RNA
gcuuucuuuggggaggggaug

SEQ ID NO: 34981 - RNA, 21 nt, Artificial Sequence
  GATA2 Guide RNA
ggaaccccaccggacagaccc

SEQ ID NO: 34982 - RNA, 21 nt, Artificial Sequence
  GATA2 Guide RNA
ggaacccucacaggccagcug

SEQ ID NO: 34983 - RNA, 21 nt, Artificial Sequence
  GATA2 Guide RNA
ggaagugggcagaaacccugu

SEQ ID NO: 34984 - RNA, 21 nt, Artificial Sequence
  GATA2 Guide RNA
ggaaugucaguccaagcugaa

SEQ ID NO: 34985 - RNA, 21 nt, Artificial Sequence
  GATA2 Guide RNA
ggacaaguggcauagaaggaa

SEQ ID NO: 34986 - RNA, 21 nt, Artificial Sequence
  GATA2 Guide RNA
ggacagacccuacagggaacc

SEQ ID NO: 34987 - RNA, 21 nt, Artificial Sequence
  GATA2 Guide RNA
ggacccacaggguuucugccc

SEQ ID NO: 34988 - RNA, 21 nt, Artificial Sequence
  GATA2 Guide RNA
ggacgccccugacagacauug

SEQ ID NO: 34989 - RNA, 21 nt, Artificial Sequence
  GATA2 Guide RNA
ggacugacauuccugauuauu

SEQ ID NO: 34990 - RNA, 21 nt, Artificial Sequence
  GATA2 Guide RNA
ggagaggugggagcagcggcc

SEQ ID NO: 34991 - RNA, 21 nt, Artificial Sequence
  GATA2 Guide RNA
ggagcagcggccgauugggga

SEQ ID NO: 34992 - RNA, 21 nt, Artificial Sequence
  GATA2 Guide RNA
ggaggggaugacugcugguuc

SEQ ID NO: 34993 - RNA, 21 nt, Artificial Sequence
  GATA2 Guide RNA
ggagggucugggacccacagg

SEQ ID NO: 34994 - RNA, 21 nt, Artificial Sequence
  GATA2 Guide RNA
ggagucgugaucucaaugucu

SEQ ID NO: 34995 - RNA, 21 nt, Artificial Sequence
  GATA2 Guide RNA
ggaucagggugggcagaaaga

SEQ ID NO: 34996 - RNA, 21 nt, Artificial Sequence
  GATA2 Guide RNA
ggaugacugcugguucuggga

SEQ ID NO: 34997 - RNA, 21 nt, Artificial Sequence
  GATA2 Guide RNA
ggcaaagagagagaggaucag

SEQ ID NO: 34998 - RNA, 21 nt, Artificial Sequence
  GATA2 Guide RNA
ggcagaaacccuguggguccc

SEQ ID NO: 34999 - RNA, 21 nt, Artificial Sequence
  GATA2 Guide RNA
ggcagaaagaucaggguaggc

SEQ ID NO: 35000 - RNA, 21 nt, Artificial Sequence
  GATA2 Guide RNA
ggcagagcuagggacgccccu

SEQ ID NO: 35001 - RNA, 21 nt, Artificial Sequence
  GATA2 Guide RNA
ggcauagaaggaaccccaccg

SEQ ID NO: 35002 - RNA, 21 nt, Artificial Sequence
  GATA2 Guide RNA
ggccagcuggaagugggcaga

SEQ ID NO: 35003 - RNA, 21 nt, Artificial Sequence
  GATA2 Guide RNA
ggccgauuggggagggucugg

SEQ ID NO: 35004 - RNA, 21 nt, Artificial Sequence
  GATA2 Guide RNA
ggccugugaggguucccugua

SEQ ID NO: 35005 - RNA, 21 nt, Artificial Sequence
  GATA2 Guide RNA
ggcgucccuagcucugccuac

SEQ ID NO: 35006 - RNA, 21 nt, Artificial Sequence
  GATA2 Guide RNA
ggcuuucuuuggggaggggau

SEQ ID NO: 35007 - RNA, 21 nt, Artificial Sequence
  GATA2 Guide RNA
gggaacccucacaggccagcu

SEQ ID NO: 35008 - RNA, 21 nt, Artificial Sequence
  GATA2 Guide RNA
gggacccacaggguuucugcc

SEQ ID NO: 35009 - RNA, 21 nt, Artificial Sequence
  GATA2 Guide RNA
gggacgccccugacagacauu

SEQ ID NO: 35010 - RNA, 21 nt, Artificial Sequence
  GATA2 Guide RNA
gggagaggugggagcagcggc

SEQ ID NO: 35011 - RNA, 21 nt, Artificial Sequence
  GATA2 Guide RNA
gggagcagcggccgauugggg

SEQ ID NO: 35012 - RNA, 21 nt, Artificial Sequence
  GATA2 Guide RNA
gggaggggaugacugcugguu

SEQ ID NO: 35013 - RNA, 21 nt, Artificial Sequence
  GATA2 Guide RNA
gggagggucugggacccacag

SEQ ID NO: 35014 - RNA, 21 nt, Artificial Sequence
  GATA2 Guide RNA
gggagucgugaucucaauguc

SEQ ID NO: 35015 - RNA, 21 nt, Artificial Sequence
  GATA2 Guide RNA
gggaugacugcugguucuggg

SEQ ID NO: 35016 - RNA, 21 nt, Artificial Sequence
  GATA2 Guide RNA
gggcaaagagagagaggauca

SEQ ID NO: 35017 - RNA, 21 nt, Artificial Sequence
  GATA2 Guide RNA
gggcagaaacccugugggucc

SEQ ID NO: 35018 - RNA, 21 nt, Artificial Sequence
  GATA2 Guide RNA
gggcagaaagaucaggguagg

SEQ ID NO: 35019 - RNA, 21 nt, Artificial Sequence
  GATA2 Guide RNA
gggcgucccuagcucugccua

SEQ ID NO: 35020 - RNA, 21 nt, Artificial Sequence
  GATA2 Guide RNA
ggggaggggaugacugcuggu

SEQ ID NO: 35021 - RNA, 21 nt, Artificial Sequence
  GATA2 Guide RNA
ggggagggucugggacccaca

SEQ ID NO: 35022 - RNA, 21 nt, Artificial Sequence
  GATA2 Guide RNA
ggggaugacugcugguucugg

SEQ ID NO: 35023 - RNA, 21 nt, Artificial Sequence
  GATA2 Guide RNA
ggggcgucccuagcucugccu

SEQ ID NO: 35024 - RNA, 21 nt, Artificial Sequence
  GATA2 Guide RNA
gggguauuauguuucuggcuu

SEQ ID NO: 35025 - RNA, 21 nt, Artificial Sequence
  GATA2 Guide RNA
gggguuccuucuaugccacuu

SEQ ID NO: 35026 - RNA, 21 nt, Artificial Sequence
  GATA2 Guide RNA
ggguaggcagagcuagggacg

SEQ ID NO: 35027 - RNA, 21 nt, Artificial Sequence
  GATA2 Guide RNA
ggguauuauguuucuggcuuu

SEQ ID NO: 35028 - RNA, 21 nt, Artificial Sequence
  GATA2 Guide RNA
gggucccagacccuccccaau

SEQ ID NO: 35029 - RNA, 21 nt, Artificial Sequence
  GATA2 Guide RNA
gggucugggacccacaggguu

SEQ ID NO: 35030 - RNA, 21 nt, Artificial Sequence
  GATA2 Guide RNA
gggucuguccggugggguucc

SEQ ID NO: 35031 - RNA, 21 nt, Artificial Sequence
  GATA2 Guide RNA
gggugggcagaaagaucaggg

SEQ ID NO: 35032 - RNA, 21 nt, Artificial Sequence
  GATA2 Guide RNA
ggguucccuguagggucuguc

SEQ ID NO: 35033 - RNA, 21 nt, Artificial Sequence
  GATA2 Guide RNA
ggguuccuucuaugccacuug

SEQ ID NO: 35034 - RNA, 21 nt, Artificial Sequence
  GATA2 Guide RNA
ggguuucugcccacuuccagc

SEQ ID NO: 35035 - RNA, 21 nt, Artificial Sequence
  GATA2 Guide RNA
gguaauaaucaggaaugucag

SEQ ID NO: 35036 - RNA, 21 nt, Artificial Sequence
  GATA2 Guide RNA
gguaggcagagcuagggacgc

SEQ ID NO: 35037 - RNA, 21 nt, Artificial Sequence
  GATA2 Guide RNA
gguauuauguuucuggcuuuc

SEQ ID NO: 35038 - RNA, 21 nt, Artificial Sequence
  GATA2 Guide RNA
ggucccagacccuccccaauc

SEQ ID NO: 35039 - RNA, 21 nt, Artificial Sequence
  GATA2 Guide RNA
ggucugggacccacaggguuu

SEQ ID NO: 35040 - RNA, 21 nt, Artificial Sequence
  GATA2 Guide RNA
ggucuguccggugggguuccu

SEQ ID NO: 35041 - RNA, 21 nt, Artificial Sequence
  GATA2 Guide RNA
ggugggagcagcggccgauug

SEQ ID NO: 35042 - RNA, 21 nt, Artificial Sequence
  GATA2 Guide RNA
ggugggcagaaagaucagggu

SEQ ID NO: 35043 - RNA, 21 nt, Artificial Sequence
  GATA2 Guide RNA
ggugggguauuauguuucugg

SEQ ID NO: 35044 - RNA, 21 nt, Artificial Sequence
  GATA2 Guide RNA
ggugggguuccuucuaugcca

SEQ ID NO: 35045 - RNA, 21 nt, Artificial Sequence
  GATA2 Guide RNA
gguucccuguagggucugucc

SEQ ID NO: 35046 - RNA, 21 nt, Artificial Sequence
  GATA2 Guide RNA
gguuccuucuaugccacuugu

SEQ ID NO: 35047 - RNA, 21 nt, Artificial Sequence
  GATA2 Guide RNA
gguucugggagucgugaucuc

SEQ ID NO: 35048 - RNA, 21 nt, Artificial Sequence
  GATA2 Guide RNA
gguuucugcccacuuccagcu

SEQ ID NO: 35049 - RNA, 21 nt, Artificial Sequence
  GATA2 Guide RNA
guaauaaucaggaaugucagu

SEQ ID NO: 35050 - RNA, 21 nt, Artificial Sequence
  GATA2 Guide RNA
guaggcagagcuagggacgcc

SEQ ID NO: 35051 - RNA, 21 nt, Artificial Sequence
  GATA2 Guide RNA
guagggucuguccgguggggu

SEQ ID NO: 35052 - RNA, 21 nt, Artificial Sequence
  GATA2 Guide RNA
guauuauguuucuggcuuucu

SEQ ID NO: 35053 - RNA, 21 nt, Artificial Sequence
  GATA2 Guide RNA
gucaggggcgucccuagcucu

SEQ ID NO: 35054 - RNA, 21 nt, Artificial Sequence
  GATA2 Guide RNA
gucaguccaagcugaaggaca

SEQ ID NO: 35055 - RNA, 21 nt, Artificial Sequence
  GATA2 Guide RNA
gucauccccuccccaaagaaa

SEQ ID NO: 35056 - RNA, 21 nt, Artificial Sequence
  GATA2 Guide RNA
guccaagcugaaggacaagug

SEQ ID NO: 35057 - RNA, 21 nt, Artificial Sequence
  GATA2 Guide RNA
gucccagacccuccccaaucg

SEQ ID NO: 35058 - RNA, 21 nt, Artificial Sequence
  GATA2 Guide RNA
gucccuagcucugccuacccu

SEQ ID NO: 35059 - RNA, 21 nt, Artificial Sequence
  GATA2 Guide RNA
guccggugggguuccuucuau

SEQ ID NO: 35060 - RNA, 21 nt, Artificial Sequence
  GATA2 Guide RNA
guccuucagcuuggacugaca

SEQ ID NO: 35061 - RNA, 21 nt, Artificial Sequence
  GATA2 Guide RNA
gucgugaucucaaugucuguc

SEQ ID NO: 35062 - RNA, 21 nt, Artificial Sequence
  GATA2 Guide RNA
gucugggacccacaggguuuc

SEQ ID NO: 35063 - RNA, 21 nt, Artificial Sequence
  GATA2 Guide RNA
gucugucaggggcgucccuag

SEQ ID NO: 35064 - RNA, 21 nt, Artificial Sequence
  GATA2 Guide RNA
gucuguccggugggguuccuu

SEQ ID NO: 35065 - RNA, 21 nt, Artificial Sequence
  GATA2 Guide RNA
gugaggguucccuguaggguc

SEQ ID NO: 35066 - RNA, 21 nt, Artificial Sequence
  GATA2 Guide RNA
gugaucucaaugucugucagg

SEQ ID NO: 35067 - RNA, 21 nt, Artificial Sequence
  GATA2 Guide RNA
guggcauagaaggaaccccac

SEQ ID NO: 35068 - RNA, 21 nt, Artificial Sequence
  GATA2 Guide RNA
gugggagcagcggccgauugg

SEQ ID NO: 35069 - RNA, 21 nt, Artificial Sequence
  GATA2 Guide RNA
gugggcagaaacccugugggu

SEQ ID NO: 35070 - RNA, 21 nt, Artificial Sequence
  GATA2 Guide RNA
gugggcagaaagaucagggua

SEQ ID NO: 35071 - RNA, 21 nt, Artificial Sequence
  GATA2 Guide RNA
gugggguauuauguuucuggc

SEQ ID NO: 35072 - RNA, 21 nt, Artificial Sequence
  GATA2 Guide RNA
gugggguuccuucuaugccac

SEQ ID NO: 35073 - RNA, 21 nt, Artificial Sequence
  GATA2 Guide RNA
gugggucccagacccucccca

SEQ ID NO: 35074 - RNA, 21 nt, Artificial Sequence
  GATA2 Guide RNA
guucccuguagggucuguccg

SEQ ID NO: 35075 - RNA, 21 nt, Artificial Sequence
  GATA2 Guide RNA
guuccuucuaugccacuuguc

SEQ ID NO: 35076 - RNA, 21 nt, Artificial Sequence
  GATA2 Guide RNA
guucugggagucgugaucuca

SEQ ID NO: 35077 - RNA, 21 nt, Artificial Sequence
  GATA2 Guide RNA
guuucugcccacuuccagcug

SEQ ID NO: 35078 - RNA, 21 nt, Artificial Sequence
  GATA2 Guide RNA
guuucuggcuuucuuugggga

SEQ ID NO: 35079 - RNA, 21 nt, Artificial Sequence
  GATA2 Guide RNA
uaauaaucaggaaugucaguc

SEQ ID NO: 35080 - RNA, 21 nt, Artificial Sequence
  GATA2 Guide RNA
uaauaccccaccgguaauaau

SEQ ID NO: 35081 - RNA, 21 nt, Artificial Sequence
  GATA2 Guide RNA
uaaucaggaaugucaguccaa

SEQ ID NO: 35082 - RNA, 21 nt, Artificial Sequence
  GATA2 Guide RNA
uacagggaacccucacaggcc

SEQ ID NO: 35083 - RNA, 21 nt, Artificial Sequence
  GATA2 Guide RNA
uaccccaccgguaauaaucag

SEQ ID NO: 35084 - RNA, 21 nt, Artificial Sequence
  GATA2 Guide RNA
uacccugaucuuucugcccac

SEQ ID NO: 35085 - RNA, 21 nt, Artificial Sequence
  GATA2 Guide RNA
uaccggugggguauuauguuu

SEQ ID NO: 35086 - RNA, 21 nt, Artificial Sequence
  GATA2 Guide RNA
uagaaggaaccccaccggaca

SEQ ID NO: 35087 - RNA, 21 nt, Artificial Sequence
  GATA2 Guide RNA
uagcucugccuacccugaucu

SEQ ID NO: 35088 - RNA, 21 nt, Artificial Sequence
  GATA2 Guide RNA
uaggcagagcuagggacgccc

SEQ ID NO: 35089 - RNA, 21 nt, Artificial Sequence
  GATA2 Guide RNA
uagggacgccccugacagaca

SEQ ID NO: 35090 - RNA, 21 nt, Artificial Sequence
  GATA2 Guide RNA
uagggucuguccggugggguu

SEQ ID NO: 35091 - RNA, 21 nt, Artificial Sequence
  GATA2 Guide RNA
uaugccacuuguccuucagcu

SEQ ID NO: 35092 - RNA, 21 nt, Artificial Sequence
  GATA2 Guide RNA
uauguuucuggcuuucuuugg

SEQ ID NO: 35093 - RNA, 21 nt, Artificial Sequence
  GATA2 Guide RNA
uauuaccggugggguauuaug

SEQ ID NO: 35094 - RNA, 21 nt, Artificial Sequence
  GATA2 Guide RNA
ucaaugucugucaggggcguc

SEQ ID NO: 35095 - RNA, 21 nt, Artificial Sequence
  GATA2 Guide RNA
ucacaggccagcuggaagugg

SEQ ID NO: 35096 - RNA, 21 nt, Artificial Sequence
  GATA2 Guide RNA
ucacgacucccagaaccagca

SEQ ID NO: 35097 - RNA, 21 nt, Artificial Sequence
  GATA2 Guide RNA
ucagcuuggacugacauuccu

SEQ ID NO: 35098 - RNA, 21 nt, Artificial Sequence
  GATA2 Guide RNA
ucaggaaugucaguccaagcu

SEQ ID NO: 35099 - RNA, 21 nt, Artificial Sequence
  GATA2 Guide RNA
ucaggggcgucccuagcucug

SEQ ID NO: 35100 - RNA, 21 nt, Artificial Sequence
  GATA2 Guide RNA
ucaggguaggcagagcuaggg

SEQ ID NO: 35101 - RNA, 21 nt, Artificial Sequence
  GATA2 Guide RNA
ucagggugggcagaaagauca

SEQ ID NO: 35102 - RNA, 21 nt, Artificial Sequence
  GATA2 Guide RNA
ucaguccaagcugaaggacaa

SEQ ID NO: 35103 - RNA, 21 nt, Artificial Sequence
  GATA2 Guide RNA
ucauccccuccccaaagaaag

SEQ ID NO: 35104 - RNA, 21 nt, Artificial Sequence
  GATA2 Guide RNA
uccaagcugaaggacaagugg

SEQ ID NO: 35105 - RNA, 21 nt, Artificial Sequence
  GATA2 Guide RNA
uccagcuggccugugaggguu

SEQ ID NO: 35106 - RNA, 21 nt, Artificial Sequence
  GATA2 Guide RNA
ucccagaaccagcagucaucc

SEQ ID NO: 35107 - RNA, 21 nt, Artificial Sequence
  GATA2 Guide RNA
ucccagacccuccccaaucgg

SEQ ID NO: 35108 - RNA, 21 nt, Artificial Sequence
  GATA2 Guide RNA
uccccaaagaaagccagaaac

SEQ ID NO: 35109 - RNA, 21 nt, Artificial Sequence
  GATA2 Guide RNA
uccccaaucggccgcugcucc

SEQ ID NO: 35110 - RNA, 21 nt, Artificial Sequence
  GATA2 Guide RNA
uccccuccccaaagaaagcca

SEQ ID NO: 35111 - RNA, 21 nt, Artificial Sequence
  GATA2 Guide RNA
ucccuagcucugccuacccug

SEQ ID NO: 35112 - RNA, 21 nt, Artificial Sequence
  GATA2 Guide RNA
ucccuguagggucuguccggu

SEQ ID NO: 35113 - RNA, 21 nt, Artificial Sequence
  GATA2 Guide RNA
uccggugggguuccuucuaug

SEQ ID NO: 35114 - RNA, 21 nt, Artificial Sequence
  GATA2 Guide RNA
uccugauuauuaccggugggg

SEQ ID NO: 35115 - RNA, 21 nt, Artificial Sequence
  GATA2 Guide RNA
uccuucagcuuggacugacau

SEQ ID NO: 35116 - RNA, 21 nt, Artificial Sequence
  GATA2 Guide RNA
uccuucuaugccacuuguccu

SEQ ID NO: 35117 - RNA, 21 nt, Artificial Sequence
  GATA2 Guide RNA
ucgugaucucaaugucuguca

SEQ ID NO: 35118 - RNA, 21 nt, Artificial Sequence
  GATA2 Guide RNA
ucuaugccacuuguccuucag

SEQ ID NO: 35119 - RNA, 21 nt, Artificial Sequence
  GATA2 Guide RNA
ucucaaugucugucaggggcg

SEQ ID NO: 35120 - RNA, 21 nt, Artificial Sequence
  GATA2 Guide RNA
ucugcccacccugauccucuc

SEQ ID NO: 35121 - RNA, 21 nt, Artificial Sequence
  GATA2 Guide RNA
ucugcccacuuccagcuggcc

SEQ ID NO: 35122 - RNA, 21 nt, Artificial Sequence
  GATA2 Guide RNA
ucugccuacccugaucuuucu

SEQ ID NO: 35123 - RNA, 21 nt, Artificial Sequence
  GATA2 Guide RNA
ucuggcuuucuuuggggaggg

SEQ ID NO: 35124 - RNA, 21 nt, Artificial Sequence
  GATA2 Guide RNA
ucugggacccacaggguuucu

SEQ ID NO: 35125 - RNA, 21 nt, Artificial Sequence
  GATA2 Guide RNA
ucugggagucgugaucucaau

SEQ ID NO: 35126 - RNA, 21 nt, Artificial Sequence
  GATA2 Guide RNA
ucugucaggggcgucccuagc

SEQ ID NO: 35127 - RNA, 21 nt, Artificial Sequence
  GATA2 Guide RNA
ucuguccggugggguuccuuc

SEQ ID NO: 35128 - RNA, 21 nt, Artificial Sequence
  GATA2 Guide RNA
ucuuucugcccacccugaucc

SEQ ID NO: 35129 - RNA, 21 nt, Artificial Sequence
  GATA2 Guide RNA
ucuuuggggaggggaugacug

SEQ ID NO: 35130 - RNA, 21 nt, Artificial Sequence
  GATA2 Guide RNA
ugaaggacaaguggcauagaa

SEQ ID NO: 35131 - RNA, 21 nt, Artificial Sequence
  GATA2 Guide RNA
ugacagacauugagaucacga

SEQ ID NO: 35132 - RNA, 21 nt, Artificial Sequence
  GATA2 Guide RNA
ugacauuccugauuauuaccg

SEQ ID NO: 35133 - RNA, 21 nt, Artificial Sequence
  GATA2 Guide RNA
ugacugcugguucugggaguc

SEQ ID NO: 35134 - RNA, 21 nt, Artificial Sequence
  GATA2 Guide RNA
ugagaucacgacucccagaac

SEQ ID NO: 35135 - RNA, 21 nt, Artificial Sequence
  GATA2 Guide RNA
ugaggguucccuguagggucu

SEQ ID NO: 35136 - RNA, 21 nt, Artificial Sequence
  GATA2 Guide RNA
ugaucucaaugucugucaggg

SEQ ID NO: 35137 - RNA, 21 nt, Artificial Sequence
  GATA2 Guide RNA
ugaucuuucugcccacccuga

SEQ ID NO: 35138 - RNA, 21 nt, Artificial Sequence
  GATA2 Guide RNA
ugauuauuaccggugggguau

SEQ ID NO: 35139 - RNA, 21 nt, Artificial Sequence
  GATA2 Guide RNA
ugccacuuguccuucagcuug

SEQ ID NO: 35140 - RNA, 21 nt, Artificial Sequence
  GATA2 Guide RNA
ugcccacccugauccucucuc

SEQ ID NO: 35141 - RNA, 21 nt, Artificial Sequence
  GATA2 Guide RNA
ugcccacuuccagcuggccug

SEQ ID NO: 35142 - RNA, 21 nt, Artificial Sequence
  GATA2 Guide RNA
ugccuacccugaucuuucugc

SEQ ID NO: 35143 - RNA, 21 nt, Artificial Sequence
  GATA2 Guide RNA
ugcugguucugggagucguga

SEQ ID NO: 35144 - RNA, 21 nt, Artificial Sequence
  GATA2 Guide RNA
uggaagugggcagaaacccug

SEQ ID NO: 35145 - RNA, 21 nt, Artificial Sequence
  GATA2 Guide RNA
uggacugacauuccugauuau

SEQ ID NO: 35146 - RNA, 21 nt, Artificial Sequence
  GATA2 Guide RNA
uggcauagaaggaaccccacc

SEQ ID NO: 35147 - RNA, 21 nt, Artificial Sequence
  GATA2 Guide RNA
uggccugugaggguucccugu

SEQ ID NO: 35148 - RNA, 21 nt, Artificial Sequence
  GATA2 Guide RNA
uggcuuucuuuggggagggga

SEQ ID NO: 35149 - RNA, 21 nt, Artificial Sequence
  GATA2 Guide RNA
ugggacccacaggguuucugc

SEQ ID NO: 35150 - RNA, 21 nt, Artificial Sequence
  GATA2 Guide RNA
ugggagcagcggccgauuggg

SEQ ID NO: 35151 - RNA, 21 nt, Artificial Sequence
  GATA2 Guide RNA
ugggagucgugaucucaaugu

SEQ ID NO: 35152 - RNA, 21 nt, Artificial Sequence
  GATA2 Guide RNA
ugggcagaaacccuguggguc

SEQ ID NO: 35153 - RNA, 21 nt, Artificial Sequence
  GATA2 Guide RNA
ugggcagaaagaucaggguag

SEQ ID NO: 35154 - RNA, 21 nt, Artificial Sequence
  GATA2 Guide RNA
uggggaggggaugacugcugg

SEQ ID NO: 35155 - RNA, 21 nt, Artificial Sequence
  GATA2 Guide RNA
uggggagggucugggacccac

SEQ ID NO: 35156 - RNA, 21 nt, Artificial Sequence
  GATA2 Guide RNA
ugggguauuauguuucuggcu

SEQ ID NO: 35157 - RNA, 21 nt, Artificial Sequence
  GATA2 Guide RNA
ugggguuccuucuaugccacu

SEQ ID NO: 35158 - RNA, 21 nt, Artificial Sequence
  GATA2 Guide RNA
ugggucccagacccuccccaa

SEQ ID NO: 35159 - RNA, 21 nt, Artificial Sequence
  GATA2 Guide RNA
ugguucugggagucgugaucu

SEQ ID NO: 35160 - RNA, 21 nt, Artificial Sequence
  GATA2 Guide RNA
uguagggucuguccggugggg

SEQ ID NO: 35161 - RNA, 21 nt, Artificial Sequence
  GATA2 Guide RNA
ugucaggggcgucccuagcuc

SEQ ID NO: 35162 - RNA, 21 nt, Artificial Sequence
  GATA2 Guide RNA
ugucaguccaagcugaaggac

SEQ ID NO: 35163 - RNA, 21 nt, Artificial Sequence
  GATA2 Guide RNA
uguccggugggguuccuucua

SEQ ID NO: 35164 - RNA, 21 nt, Artificial Sequence
  GATA2 Guide RNA
uguccuucagcuuggacugac

SEQ ID NO: 35165 - RNA, 21 nt, Artificial Sequence
  GATA2 Guide RNA
ugucugucaggggcgucccua

SEQ ID NO: 35166 - RNA, 21 nt, Artificial Sequence
  GATA2 Guide RNA
ugugaggguucccuguagggu

SEQ ID NO: 35167 - RNA, 21 nt, Artificial Sequence
  GATA2 Guide RNA
ugugggucccagacccucccc

SEQ ID NO: 35168 - RNA, 21 nt, Artificial Sequence
  GATA2 Guide RNA
uguuucuggcuuucuuugggg

SEQ ID NO: 35169 - RNA, 21 nt, Artificial Sequence
  GATA2 Guide RNA
uuaccggugggguauuauguu

SEQ ID NO: 35170 - RNA, 21 nt, Artificial Sequence
  GATA2 Guide RNA
uuauguuucuggcuuucuuug

SEQ ID NO: 35171 - RNA, 21 nt, Artificial Sequence
  GATA2 Guide RNA
uuauuaccggugggguauuau

SEQ ID NO: 35172 - RNA, 21 nt, Artificial Sequence
  GATA2 Guide RNA
uucagcuuggacugacauucc

SEQ ID NO: 35173 - RNA, 21 nt, Artificial Sequence
  GATA2 Guide RNA
uuccagcuggccugugagggu

SEQ ID NO: 35174 - RNA, 21 nt, Artificial Sequence
  GATA2 Guide RNA
uucccuguagggucuguccgg

SEQ ID NO: 35175 - RNA, 21 nt, Artificial Sequence
  GATA2 Guide RNA
uuccugauuauuaccgguggg

SEQ ID NO: 35176 - RNA, 21 nt, Artificial Sequence
  GATA2 Guide RNA
uuccuucuaugccacuugucc

SEQ ID NO: 35177 - RNA, 21 nt, Artificial Sequence
  GATA2 Guide RNA
uucuaugccacuuguccuuca

SEQ ID NO: 35178 - RNA, 21 nt, Artificial Sequence
  GATA2 Guide RNA
uucugcccacccugauccucu

SEQ ID NO: 35179 - RNA, 21 nt, Artificial Sequence
  GATA2 Guide RNA
uucugcccacuuccagcuggc

SEQ ID NO: 35180 - RNA, 21 nt, Artificial Sequence
  GATA2 Guide RNA
uucuggcuuucuuuggggagg

SEQ ID NO: 35181 - RNA, 21 nt, Artificial Sequence
  GATA2 Guide RNA
uucugggagucgugaucucaa

SEQ ID NO: 35182 - RNA, 21 nt, Artificial Sequence
  GATA2 Guide RNA
uucuuuggggaggggaugacu

SEQ ID NO: 35183 - RNA, 21 nt, Artificial Sequence
  GATA2 Guide RNA
uugagaucacgacucccagaa

SEQ ID NO: 35184 - RNA, 21 nt, Artificial Sequence
  GATA2 Guide RNA
uuggacugacauuccugauua

SEQ ID NO: 35185 - RNA, 21 nt, Artificial Sequence
  GATA2 Guide RNA
uuggggaggggaugacugcug

SEQ ID NO: 35186 - RNA, 21 nt, Artificial Sequence
  GATA2 Guide RNA
uuggggagggucugggaccca

SEQ ID NO: 35187 - RNA, 21 nt, Artificial Sequence
  GATA2 Guide RNA
uuguccuucagcuuggacuga

SEQ ID NO: 35188 - RNA, 21 nt, Artificial Sequence
  GATA2 Guide RNA
uuucugcccacccugauccuc

SEQ ID NO: 35189 - RNA, 21 nt, Artificial Sequence
  GATA2 Guide RNA
uuucugcccacuuccagcugg

SEQ ID NO: 35190 - RNA, 21 nt, Artificial Sequence
  GATA2 Guide RNA
uuucuggcuuucuuuggggag

SEQ ID NO: 35191 - RNA, 21 nt, Artificial Sequence
  GATA2 Guide RNA
uuucuuuggggaggggaugac

SEQ ID NO: 35192 - RNA, 21 nt, Artificial Sequence
  GATA2 Guide RNA
uuuggggaggggaugacugcu

SEQ ID NO: 35193 - RNA, 22 nt, Artificial Sequence
  GATA2 Guide RNA
aaacauaauaccccaccgguaa

SEQ ID NO: 35194 - RNA, 22 nt, Artificial Sequence
  GATA2 Guide RNA
aaacccugugggucccagaccc

SEQ ID NO: 35195 - RNA, 22 nt, Artificial Sequence
  GATA2 Guide RNA
aaagagagagaggaucagggug

SEQ ID NO: 35196 - RNA, 22 nt, Artificial Sequence
  GATA2 Guide RNA
aaagaucaggguaggcagagcu

SEQ ID NO: 35197 - RNA, 22 nt, Artificial Sequence
  GATA2 Guide RNA
aaagccagaaacauaauacccc

SEQ ID NO: 35198 - RNA, 22 nt, Artificial Sequence
  GATA2 Guide RNA
aacauaauaccccaccgguaau

SEQ ID NO: 35199 - RNA, 22 nt, Artificial Sequence
  GATA2 Guide RNA
aaccagcagucauccccucccc

SEQ ID NO: 35200 - RNA, 22 nt, Artificial Sequence
  GATA2 Guide RNA
aaccccaccggacagacccuac

SEQ ID NO: 35201 - RNA, 22 nt, Artificial Sequence
  GATA2 Guide RNA
aacccucacaggccagcuggaa

SEQ ID NO: 35202 - RNA, 22 nt, Artificial Sequence
  GATA2 Guide RNA
aacccugugggucccagacccu

SEQ ID NO: 35203 - RNA, 22 nt, Artificial Sequence
  GATA2 Guide RNA
aagaaagccagaaacauaauac

SEQ ID NO: 35204 - RNA, 22 nt, Artificial Sequence
  GATA2 Guide RNA
aagagagagaggaucagggugg

SEQ ID NO: 35205 - RNA, 22 nt, Artificial Sequence
  GATA2 Guide RNA
aagaucaggguaggcagagcua

SEQ ID NO: 35206 - RNA, 22 nt, Artificial Sequence
  GATA2 Guide RNA
aagccagaaacauaauacccca

SEQ ID NO: 35207 - RNA, 22 nt, Artificial Sequence
  GATA2 Guide RNA
aagcugaaggacaaguggcaua

SEQ ID NO: 35208 - RNA, 22 nt, Artificial Sequence
  GATA2 Guide RNA
aaggaaccccaccggacagacc

SEQ ID NO: 35209 - RNA, 22 nt, Artificial Sequence
  GATA2 Guide RNA
aaggacaaguggcauagaagga

SEQ ID NO: 35210 - RNA, 22 nt, Artificial Sequence
  GATA2 Guide RNA
aaguggcauagaaggaacccca

SEQ ID NO: 35211 - RNA, 22 nt, Artificial Sequence
  GATA2 Guide RNA
aagugggcagaaacccuguggg

SEQ ID NO: 35212 - RNA, 22 nt, Artificial Sequence
  GATA2 Guide RNA
aauaaucaggaaugucagucca

SEQ ID NO: 35213 - RNA, 22 nt, Artificial Sequence
  GATA2 Guide RNA
aauaccccaccgguaauaauca

SEQ ID NO: 35214 - RNA, 22 nt, Artificial Sequence
  GATA2 Guide RNA
aaucaggaaugucaguccaagc

SEQ ID NO: 35215 - RNA, 22 nt, Artificial Sequence
  GATA2 Guide RNA
aaucggccgcugcucccaccuc

SEQ ID NO: 35216 - RNA, 22 nt, Artificial Sequence
  GATA2 Guide RNA
aaugucaguccaagcugaagga

SEQ ID NO: 35217 - RNA, 22 nt, Artificial Sequence
  GATA2 Guide RNA
aaugucugucaggggcgucccu

SEQ ID NO: 35218 - RNA, 22 nt, Artificial Sequence
  GATA2 Guide RNA
acaaguggcauagaaggaaccc

SEQ ID NO: 35219 - RNA, 22 nt, Artificial Sequence
  GATA2 Guide RNA
acagacauugagaucacgacuc

SEQ ID NO: 35220 - RNA, 22 nt, Artificial Sequence
  GATA2 Guide RNA
acagacccuacagggaacccuc

SEQ ID NO: 35221 - RNA, 22 nt, Artificial Sequence
  GATA2 Guide RNA
acaggccagcuggaagugggca

SEQ ID NO: 35222 - RNA, 22 nt, Artificial Sequence
  GATA2 Guide RNA
acagggaacccucacaggccag

SEQ ID NO: 35223 - RNA, 22 nt, Artificial Sequence
  GATA2 Guide RNA
acaggguuucugcccacuucca

SEQ ID NO: 35224 - RNA, 22 nt, Artificial Sequence
  GATA2 Guide RNA
acauaauaccccaccgguaaua

SEQ ID NO: 35225 - RNA, 22 nt, Artificial Sequence
  GATA2 Guide RNA
acauuccugauuauuaccggug

SEQ ID NO: 35226 - RNA, 22 nt, Artificial Sequence
  GATA2 Guide RNA
acauugagaucacgacucccag

SEQ ID NO: 35227 - RNA, 22 nt, Artificial Sequence
  GATA2 Guide RNA
accagcagucauccccucccca

SEQ ID NO: 35228 - RNA, 22 nt, Artificial Sequence
  GATA2 Guide RNA
acccacaggguuucugcccacu

SEQ ID NO: 35229 - RNA, 22 nt, Artificial Sequence
  GATA2 Guide RNA
accccaccggacagacccuaca

SEQ ID NO: 35230 - RNA, 22 nt, Artificial Sequence
  GATA2 Guide RNA
accccaccgguaauaaucagga

SEQ ID NO: 35231 - RNA, 22 nt, Artificial Sequence
  GATA2 Guide RNA
acccuacagggaacccucacag

SEQ ID NO: 35232 - RNA, 22 nt, Artificial Sequence
  GATA2 Guide RNA
acccucacaggccagcuggaag

SEQ ID NO: 35233 - RNA, 22 nt, Artificial Sequence
  GATA2 Guide RNA
acccuccccaaucggccgcugc

SEQ ID NO: 35234 - RNA, 22 nt, Artificial Sequence
  GATA2 Guide RNA
acccugauccucucucucuuug

SEQ ID NO: 35235 - RNA, 22 nt, Artificial Sequence
  GATA2 Guide RNA
acccugaucuuucugcccaccc

SEQ ID NO: 35236 - RNA, 22 nt, Artificial Sequence
  GATA2 Guide RNA
acccugugggucccagacccuc

SEQ ID NO: 35237 - RNA, 22 nt, Artificial Sequence
  GATA2 Guide RNA
accggacagacccuacagggaa

SEQ ID NO: 35238 - RNA, 22 nt, Artificial Sequence
  GATA2 Guide RNA
accgguaauaaucaggaauguc

SEQ ID NO: 35239 - RNA, 22 nt, Artificial Sequence
  GATA2 Guide RNA
accggugggguauuauguuucu

SEQ ID NO: 35240 - RNA, 22 nt, Artificial Sequence
  GATA2 Guide RNA
acgacucccagaaccagcaguc

SEQ ID NO: 35241 - RNA, 22 nt, Artificial Sequence
  GATA2 Guide RNA
acgccccugacagacauugaga

SEQ ID NO: 35242 - RNA, 22 nt, Artificial Sequence
  GATA2 Guide RNA
acucccagaaccagcagucauc

SEQ ID NO: 35243 - RNA, 22 nt, Artificial Sequence
  GATA2 Guide RNA
acugacauuccugauuauuacc

SEQ ID NO: 35244 - RNA, 22 nt, Artificial Sequence
  GATA2 Guide RNA
acugcugguucugggagucgug

SEQ ID NO: 35245 - RNA, 22 nt, Artificial Sequence
  GATA2 Guide RNA
acuuccagcuggccugugaggg

SEQ ID NO: 35246 - RNA, 22 nt, Artificial Sequence
  GATA2 Guide RNA
acuuguccuucagcuuggacug

SEQ ID NO: 35247 - RNA, 22 nt, Artificial Sequence
  GATA2 Guide RNA
agaaacauaauaccccaccggu

SEQ ID NO: 35248 - RNA, 22 nt, Artificial Sequence
  GATA2 Guide RNA
agaaacccugugggucccagac

SEQ ID NO: 35249 - RNA, 22 nt, Artificial Sequence
  GATA2 Guide RNA
agaaagaucaggguaggcagag

SEQ ID NO: 35250 - RNA, 22 nt, Artificial Sequence
  GATA2 Guide RNA
agaaagccagaaacauaauacc

SEQ ID NO: 35251 - RNA, 22 nt, Artificial Sequence
  GATA2 Guide RNA
agaaccagcagucauccccucc

SEQ ID NO: 35252 - RNA, 22 nt, Artificial Sequence
  GATA2 Guide RNA
agaaggaaccccaccggacaga

SEQ ID NO: 35253 - RNA, 22 nt, Artificial Sequence
  GATA2 Guide RNA
agacauugagaucacgacuccc

SEQ ID NO: 35254 - RNA, 22 nt, Artificial Sequence
  GATA2 Guide RNA
agacccuacagggaacccucac

SEQ ID NO: 35255 - RNA, 22 nt, Artificial Sequence
  GATA2 Guide RNA
agacccuccccaaucggccgcu

SEQ ID NO: 35256 - RNA, 22 nt, Artificial Sequence
  GATA2 Guide RNA
agagagagaggaucaggguggg

SEQ ID NO: 35257 - RNA, 22 nt, Artificial Sequence
  GATA2 Guide RNA
agagagaggaucagggugggca

SEQ ID NO: 35258 - RNA, 22 nt, Artificial Sequence
  GATA2 Guide RNA
agagaggaucagggugggcaga

SEQ ID NO: 35259 - RNA, 22 nt, Artificial Sequence
  GATA2 Guide RNA
agagcuagggacgccccugaca

SEQ ID NO: 35260 - RNA, 22 nt, Artificial Sequence
  GATA2 Guide RNA
agaggaucagggugggcagaaa

SEQ ID NO: 35261 - RNA, 22 nt, Artificial Sequence
  GATA2 Guide RNA
agaggugggagcagcggccgau

SEQ ID NO: 35262 - RNA, 22 nt, Artificial Sequence
  GATA2 Guide RNA
agaucacgacucccagaaccag

SEQ ID NO: 35263 - RNA, 22 nt, Artificial Sequence
  GATA2 Guide RNA
agaucaggguaggcagagcuag

SEQ ID NO: 35264 - RNA, 22 nt, Artificial Sequence
  GATA2 Guide RNA
agcagcggccgauuggggaggg

SEQ ID NO: 35265 - RNA, 22 nt, Artificial Sequence
  GATA2 Guide RNA
agcagucauccccuccccaaag

SEQ ID NO: 35266 - RNA, 22 nt, Artificial Sequence
  GATA2 Guide RNA
agccagaaacauaauaccccac

SEQ ID NO: 35267 - RNA, 22 nt, Artificial Sequence
  GATA2 Guide RNA
agcggccgauuggggagggucu

SEQ ID NO: 35268 - RNA, 22 nt, Artificial Sequence
  GATA2 Guide RNA
agcuagggacgccccugacaga

SEQ ID NO: 35269 - RNA, 22 nt, Artificial Sequence
  GATA2 Guide RNA
agcucugccuacccugaucuuu

SEQ ID NO: 35270 - RNA, 22 nt, Artificial Sequence
  GATA2 Guide RNA
agcugaaggacaaguggcauag

SEQ ID NO: 35271 - RNA, 22 nt, Artificial Sequence
  GATA2 Guide RNA
agcuggaagugggcagaaaccc

SEQ ID NO: 35272 - RNA, 22 nt, Artificial Sequence
  GATA2 Guide RNA
agcuggccugugaggguucccu

SEQ ID NO: 35273 - RNA, 22 nt, Artificial Sequence
  GATA2 Guide RNA
agcuuggacugacauuccugau

SEQ ID NO: 35274 - RNA, 22 nt, Artificial Sequence
  GATA2 Guide RNA
aggaaccccaccggacagaccc

SEQ ID NO: 35275 - RNA, 22 nt, Artificial Sequence
  GATA2 Guide RNA
aggaaugucaguccaagcugaa

SEQ ID NO: 35276 - RNA, 22 nt, Artificial Sequence
  GATA2 Guide RNA
aggacaaguggcauagaaggaa

SEQ ID NO: 35277 - RNA, 22 nt, Artificial Sequence
  GATA2 Guide RNA
aggaucagggugggcagaaaga

SEQ ID NO: 35278 - RNA, 22 nt, Artificial Sequence
  GATA2 Guide RNA
aggcagagcuagggacgccccu

SEQ ID NO: 35279 - RNA, 22 nt, Artificial Sequence
  GATA2 Guide RNA
aggccagcuggaagugggcaga

SEQ ID NO: 35280 - RNA, 22 nt, Artificial Sequence
  GATA2 Guide RNA
agggaacccucacaggccagcu

SEQ ID NO: 35281 - RNA, 22 nt, Artificial Sequence
  GATA2 Guide RNA
agggacgccccugacagacauu

SEQ ID NO: 35282 - RNA, 22 nt, Artificial Sequence
  GATA2 Guide RNA
aggggaugacugcugguucugg

SEQ ID NO: 35283 - RNA, 22 nt, Artificial Sequence
  GATA2 Guide RNA
aggggcgucccuagcucugccu

SEQ ID NO: 35284 - RNA, 22 nt, Artificial Sequence
  GATA2 Guide RNA
aggguaggcagagcuagggacg

SEQ ID NO: 35285 - RNA, 22 nt, Artificial Sequence
  GATA2 Guide RNA
agggucugggacccacaggguu

SEQ ID NO: 35286 - RNA, 22 nt, Artificial Sequence
  GATA2 Guide RNA
agggucuguccggugggguucc

SEQ ID NO: 35287 - RNA, 22 nt, Artificial Sequence
  GATA2 Guide RNA
agggugggcagaaagaucaggg

SEQ ID NO: 35288 - RNA, 22 nt, Artificial Sequence
  GATA2 Guide RNA
aggguucccuguagggucuguc

SEQ ID NO: 35289 - RNA, 22 nt, Artificial Sequence
  GATA2 Guide RNA
aggguuucugcccacuuccagc

SEQ ID NO: 35290 - RNA, 22 nt, Artificial Sequence
  GATA2 Guide RNA
aggugggagcagcggccgauug

SEQ ID NO: 35291 - RNA, 22 nt, Artificial Sequence
  GATA2 Guide RNA
agucauccccuccccaaagaaa

SEQ ID NO: 35292 - RNA, 22 nt, Artificial Sequence
  GATA2 Guide RNA
aguccaagcugaaggacaagug

SEQ ID NO: 35293 - RNA, 22 nt, Artificial Sequence
  GATA2 Guide RNA
agucgugaucucaaugucuguc

SEQ ID NO: 35294 - RNA, 22 nt, Artificial Sequence
  GATA2 Guide RNA
aguggcauagaaggaaccccac

SEQ ID NO: 35295 - RNA, 22 nt, Artificial Sequence
  GATA2 Guide RNA
agugggcagaaacccugugggu

SEQ ID NO: 35296 - RNA, 22 nt, Artificial Sequence
  GATA2 Guide RNA
auaauaccccaccgguaauaau

SEQ ID NO: 35297 - RNA, 22 nt, Artificial Sequence
  GATA2 Guide RNA
auaaucaggaaugucaguccaa

SEQ ID NO: 35298 - RNA, 22 nt, Artificial Sequence
  GATA2 Guide RNA
auaccccaccgguaauaaucag

SEQ ID NO: 35299 - RNA, 22 nt, Artificial Sequence
  GATA2 Guide RNA
auagaaggaaccccaccggaca

SEQ ID NO: 35300 - RNA, 22 nt, Artificial Sequence
  GATA2 Guide RNA
aucacgacucccagaaccagca

SEQ ID NO: 35301 - RNA, 22 nt, Artificial Sequence
  GATA2 Guide RNA
aucaggaaugucaguccaagcu

SEQ ID NO: 35302 - RNA, 22 nt, Artificial Sequence
  GATA2 Guide RNA
aucaggguaggcagagcuaggg

SEQ ID NO: 35303 - RNA, 22 nt, Artificial Sequence
  GATA2 Guide RNA
aucagggugggcagaaagauca

SEQ ID NO: 35304 - RNA, 22 nt, Artificial Sequence
  GATA2 Guide RNA
auccccuccccaaagaaagcca

SEQ ID NO: 35305 - RNA, 22 nt, Artificial Sequence
  GATA2 Guide RNA
aucucaaugucugucaggggcg

SEQ ID NO: 35306 - RNA, 22 nt, Artificial Sequence
  GATA2 Guide RNA
aucuuucugcccacccugaucc

SEQ ID NO: 35307 - RNA, 22 nt, Artificial Sequence
  GATA2 Guide RNA
augacugcugguucugggaguc

SEQ ID NO: 35308 - RNA, 22 nt, Artificial Sequence
  GATA2 Guide RNA
augccacuuguccuucagcuug

SEQ ID NO: 35309 - RNA, 22 nt, Artificial Sequence
  GATA2 Guide RNA
augucaguccaagcugaaggac

SEQ ID NO: 35310 - RNA, 22 nt, Artificial Sequence
  GATA2 Guide RNA
augucugucaggggcgucccua

SEQ ID NO: 35311 - RNA, 22 nt, Artificial Sequence
  GATA2 Guide RNA
auguuucuggcuuucuuugggg

SEQ ID NO: 35312 - RNA, 22 nt, Artificial Sequence
  GATA2 Guide RNA
auuaccggugggguauuauguu

SEQ ID NO: 35313 - RNA, 22 nt, Artificial Sequence
  GATA2 Guide RNA
auuauguuucuggcuuucuuug

SEQ ID NO: 35314 - RNA, 22 nt, Artificial Sequence
  GATA2 Guide RNA
auuauuaccggugggguauuau

SEQ ID NO: 35315 - RNA, 22 nt, Artificial Sequence
  GATA2 Guide RNA
auuccugauuauuaccgguggg

SEQ ID NO: 35316 - RNA, 22 nt, Artificial Sequence
  GATA2 Guide RNA
auugagaucacgacucccagaa

SEQ ID NO: 35317 - RNA, 22 nt, Artificial Sequence
  GATA2 Guide RNA
auuggggagggucugggaccca

SEQ ID NO: 35318 - RNA, 22 nt, Artificial Sequence
  GATA2 Guide RNA
caaagaaagccagaaacauaau

SEQ ID NO: 35319 - RNA, 22 nt, Artificial Sequence
  GATA2 Guide RNA
caaagagagagaggaucagggu

SEQ ID NO: 35320 - RNA, 22 nt, Artificial Sequence
  GATA2 Guide RNA
caagcugaaggacaaguggcau

SEQ ID NO: 35321 - RNA, 22 nt, Artificial Sequence
  GATA2 Guide RNA
caaguggcauagaaggaacccc

SEQ ID NO: 35322 - RNA, 22 nt, Artificial Sequence
  GATA2 Guide RNA
caaucggccgcugcucccaccu

SEQ ID NO: 35323 - RNA, 22 nt, Artificial Sequence
  GATA2 Guide RNA
caaugucugucaggggcguccc

SEQ ID NO: 35324 - RNA, 22 nt, Artificial Sequence
  GATA2 Guide RNA
cacaggccagcuggaagugggc

SEQ ID NO: 35325 - RNA, 22 nt, Artificial Sequence
  GATA2 Guide RNA
cacaggguuucugcccacuucc

SEQ ID NO: 35326 - RNA, 22 nt, Artificial Sequence
  GATA2 Guide RNA
cacccugauccucucucucuuu

SEQ ID NO: 35327 - RNA, 22 nt, Artificial Sequence
  GATA2 Guide RNA
caccggacagacccuacaggga

SEQ ID NO: 35328 - RNA, 22 nt, Artificial Sequence
  GATA2 Guide RNA
caccgguaauaaucaggaaugu

SEQ ID NO: 35329 - RNA, 22 nt, Artificial Sequence
  GATA2 Guide RNA
cacgacucccagaaccagcagu

SEQ ID NO: 35330 - RNA, 22 nt, Artificial Sequence
  GATA2 Guide RNA
cacuuccagcuggccugugagg

SEQ ID NO: 35331 - RNA, 22 nt, Artificial Sequence
  GATA2 Guide RNA
cacuuguccuucagcuuggacu

SEQ ID NO: 35332 - RNA, 22 nt, Artificial Sequence
  GATA2 Guide RNA
cagaaacauaauaccccaccgg

SEQ ID NO: 35333 - RNA, 22 nt, Artificial Sequence
  GATA2 Guide RNA
cagaaacccugugggucccaga

SEQ ID NO: 35334 - RNA, 22 nt, Artificial Sequence
  GATA2 Guide RNA
cagaaagaucaggguaggcaga

SEQ ID NO: 35335 - RNA, 22 nt, Artificial Sequence
  GATA2 Guide RNA
cagaaccagcagucauccccuc

SEQ ID NO: 35336 - RNA, 22 nt, Artificial Sequence
  GATA2 Guide RNA
cagacauugagaucacgacucc

SEQ ID NO: 35337 - RNA, 22 nt, Artificial Sequence
  GATA2 Guide RNA
cagacccuacagggaacccuca

SEQ ID NO: 35338 - RNA, 22 nt, Artificial Sequence
  GATA2 Guide RNA
cagacccuccccaaucggccgc

SEQ ID NO: 35339 - RNA, 22 nt, Artificial Sequence
  GATA2 Guide RNA
cagagcuagggacgccccugac

SEQ ID NO: 35340 - RNA, 22 nt, Artificial Sequence
  GATA2 Guide RNA
cagcagucauccccuccccaaa

SEQ ID NO: 35341 - RNA, 22 nt, Artificial Sequence
  GATA2 Guide RNA
cagcggccgauuggggaggguc

SEQ ID NO: 35342 - RNA, 22 nt, Artificial Sequence
  GATA2 Guide RNA
cagcuggaagugggcagaaacc

SEQ ID NO: 35343 - RNA, 22 nt, Artificial Sequence
  GATA2 Guide RNA
cagcuggccugugaggguuccc

SEQ ID NO: 35344 - RNA, 22 nt, Artificial Sequence
  GATA2 Guide RNA
cagcuuggacugacauuccuga

SEQ ID NO: 35345 - RNA, 22 nt, Artificial Sequence
  GATA2 Guide RNA
caggaaugucaguccaagcuga

SEQ ID NO: 35346 - RNA, 22 nt, Artificial Sequence
  GATA2 Guide RNA
caggccagcuggaagugggcag

SEQ ID NO: 35347 - RNA, 22 nt, Artificial Sequence
  GATA2 Guide RNA
cagggaacccucacaggccagc

SEQ ID NO: 35348 - RNA, 22 nt, Artificial Sequence
  GATA2 Guide RNA
caggggcgucccuagcucugcc

SEQ ID NO: 35349 - RNA, 22 nt, Artificial Sequence
  GATA2 Guide RNA
caggguaggcagagcuagggac

SEQ ID NO: 35350 - RNA, 22 nt, Artificial Sequence
  GATA2 Guide RNA
cagggugggcagaaagaucagg

SEQ ID NO: 35351 - RNA, 22 nt, Artificial Sequence
  GATA2 Guide RNA
caggguuucugcccacuuccag

SEQ ID NO: 35352 - RNA, 22 nt, Artificial Sequence
  GATA2 Guide RNA
cagucauccccuccccaaagaa

SEQ ID NO: 35353 - RNA, 22 nt, Artificial Sequence
  GATA2 Guide RNA
caguccaagcugaaggacaagu

SEQ ID NO: 35354 - RNA, 22 nt, Artificial Sequence
  GATA2 Guide RNA
cauaauaccccaccgguaauaa

SEQ ID NO: 35355 - RNA, 22 nt, Artificial Sequence
  GATA2 Guide RNA
cauagaaggaaccccaccggac

SEQ ID NO: 35356 - RNA, 22 nt, Artificial Sequence
  GATA2 Guide RNA
cauccccuccccaaagaaagcc

SEQ ID NO: 35357 - RNA, 22 nt, Artificial Sequence
  GATA2 Guide RNA
cauuccugauuauuaccggugg

SEQ ID NO: 35358 - RNA, 22 nt, Artificial Sequence
  GATA2 Guide RNA
cauugagaucacgacucccaga

SEQ ID NO: 35359 - RNA, 22 nt, Artificial Sequence
  GATA2 Guide RNA
ccaaagaaagccagaaacauaa

SEQ ID NO: 35360 - RNA, 22 nt, Artificial Sequence
  GATA2 Guide RNA
ccaagcugaaggacaaguggca

SEQ ID NO: 35361 - RNA, 22 nt, Artificial Sequence
  GATA2 Guide RNA
ccaaucggccgcugcucccacc

SEQ ID NO: 35362 - RNA, 22 nt, Artificial Sequence
  GATA2 Guide RNA
ccacaggguuucugcccacuuc

SEQ ID NO: 35363 - RNA, 22 nt, Artificial Sequence
  GATA2 Guide RNA
ccacccugauccucucucucuu

SEQ ID NO: 35364 - RNA, 22 nt, Artificial Sequence
  GATA2 Guide RNA
ccaccggacagacccuacaggg

SEQ ID NO: 35365 - RNA, 22 nt, Artificial Sequence
  GATA2 Guide RNA
ccaccgguaauaaucaggaaug

SEQ ID NO: 35366 - RNA, 22 nt, Artificial Sequence
  GATA2 Guide RNA
ccacuuccagcuggccugugag

SEQ ID NO: 35367 - RNA, 22 nt, Artificial Sequence
  GATA2 Guide RNA
ccacuuguccuucagcuuggac

SEQ ID NO: 35368 - RNA, 22 nt, Artificial Sequence
  GATA2 Guide RNA
ccagaaacauaauaccccaccg

SEQ ID NO: 35369 - RNA, 22 nt, Artificial Sequence
  GATA2 Guide RNA
ccagaaccagcagucauccccu

SEQ ID NO: 35370 - RNA, 22 nt, Artificial Sequence
  GATA2 Guide RNA
ccagacccuccccaaucggccg

SEQ ID NO: 35371 - RNA, 22 nt, Artificial Sequence
  GATA2 Guide RNA
ccagcagucauccccuccccaa

SEQ ID NO: 35372 - RNA, 22 nt, Artificial Sequence
  GATA2 Guide RNA
ccagcuggaagugggcagaaac

SEQ ID NO: 35373 - RNA, 22 nt, Artificial Sequence
  GATA2 Guide RNA
ccagcuggccugugaggguucc

SEQ ID NO: 35374 - RNA, 22 nt, Artificial Sequence
  GATA2 Guide RNA
cccaaagaaagccagaaacaua

SEQ ID NO: 35375 - RNA, 22 nt, Artificial Sequence
  GATA2 Guide RNA
cccaaucggccgcugcucccac

SEQ ID NO: 35376 - RNA, 22 nt, Artificial Sequence
  GATA2 Guide RNA
cccacaggguuucugcccacuu

SEQ ID NO: 35377 - RNA, 22 nt, Artificial Sequence
  GATA2 Guide RNA
cccacccugauccucucucucu

SEQ ID NO: 35378 - RNA, 22 nt, Artificial Sequence
  GATA2 Guide RNA
cccaccggacagacccuacagg

SEQ ID NO: 35379 - RNA, 22 nt, Artificial Sequence
  GATA2 Guide RNA
cccaccgguaauaaucaggaau

SEQ ID NO: 35380 - RNA, 22 nt, Artificial Sequence
  GATA2 Guide RNA
cccacuuccagcuggccuguga

SEQ ID NO: 35381 - RNA, 22 nt, Artificial Sequence
  GATA2 Guide RNA
cccagaaccagcagucaucccc

SEQ ID NO: 35382 - RNA, 22 nt, Artificial Sequence
  GATA2 Guide RNA
cccagacccuccccaaucggcc

SEQ ID NO: 35383 - RNA, 22 nt, Artificial Sequence
  GATA2 Guide RNA
ccccaaagaaagccagaaacau

SEQ ID NO: 35384 - RNA, 22 nt, Artificial Sequence
  GATA2 Guide RNA
ccccaaucggccgcugcuccca

SEQ ID NO: 35385 - RNA, 22 nt, Artificial Sequence
  GATA2 Guide RNA
ccccaccggacagacccuacag

SEQ ID NO: 35386 - RNA, 22 nt, Artificial Sequence
  GATA2 Guide RNA
ccccaccgguaauaaucaggaa

SEQ ID NO: 35387 - RNA, 22 nt, Artificial Sequence
  GATA2 Guide RNA
ccccuccccaaagaaagccaga

SEQ ID NO: 35388 - RNA, 22 nt, Artificial Sequence
  GATA2 Guide RNA
ccccugacagacauugagauca

SEQ ID NO: 35389 - RNA, 22 nt, Artificial Sequence
  GATA2 Guide RNA
cccuacagggaacccucacagg

SEQ ID NO: 35390 - RNA, 22 nt, Artificial Sequence
  GATA2 Guide RNA
cccuagcucugccuacccugau

SEQ ID NO: 35391 - RNA, 22 nt, Artificial Sequence
  GATA2 Guide RNA
cccucacaggccagcuggaagu

SEQ ID NO: 35392 - RNA, 22 nt, Artificial Sequence
  GATA2 Guide RNA
cccuccccaaagaaagccagaa

SEQ ID NO: 35393 - RNA, 22 nt, Artificial Sequence
  GATA2 Guide RNA
cccuccccaaucggccgcugcu

SEQ ID NO: 35394 - RNA, 22 nt, Artificial Sequence
  GATA2 Guide RNA
cccugacagacauugagaucac

SEQ ID NO: 35395 - RNA, 22 nt, Artificial Sequence
  GATA2 Guide RNA
cccugauccucucucucuuugc

SEQ ID NO: 35396 - RNA, 22 nt, Artificial Sequence
  GATA2 Guide RNA
cccugaucuuucugcccacccu

SEQ ID NO: 35397 - RNA, 22 nt, Artificial Sequence
  GATA2 Guide RNA
cccuguagggucuguccggugg

SEQ ID NO: 35398 - RNA, 22 nt, Artificial Sequence
  GATA2 Guide RNA
cccugugggucccagacccucc

SEQ ID NO: 35399 - RNA, 22 nt, Artificial Sequence
  GATA2 Guide RNA
ccgauuggggagggucugggac

SEQ ID NO: 35400 - RNA, 22 nt, Artificial Sequence
  GATA2 Guide RNA
ccggacagacccuacagggaac

SEQ ID NO: 35401 - RNA, 22 nt, Artificial Sequence
  GATA2 Guide RNA
ccgguaauaaucaggaauguca

SEQ ID NO: 35402 - RNA, 22 nt, Artificial Sequence
  GATA2 Guide RNA
ccggugggguauuauguuucug

SEQ ID NO: 35403 - RNA, 22 nt, Artificial Sequence
  GATA2 Guide RNA
ccggugggguuccuucuaugcc

SEQ ID NO: 35404 - RNA, 22 nt, Artificial Sequence
  GATA2 Guide RNA
ccuacagggaacccucacaggc

SEQ ID NO: 35405 - RNA, 22 nt, Artificial Sequence
  GATA2 Guide RNA
ccuacccugaucuuucugccca

SEQ ID NO: 35406 - RNA, 22 nt, Artificial Sequence
  GATA2 Guide RNA
ccuagcucugccuacccugauc

SEQ ID NO: 35407 - RNA, 22 nt, Artificial Sequence
  GATA2 Guide RNA
ccucacaggccagcuggaagug

SEQ ID NO: 35408 - RNA, 22 nt, Artificial Sequence
  GATA2 Guide RNA
ccuccccaaagaaagccagaaa

SEQ ID NO: 35409 - RNA, 22 nt, Artificial Sequence
  GATA2 Guide RNA
ccuccccaaucggccgcugcuc

SEQ ID NO: 35410 - RNA, 22 nt, Artificial Sequence
  GATA2 Guide RNA
ccugacagacauugagaucacg

SEQ ID NO: 35411 - RNA, 22 nt, Artificial Sequence
  GATA2 Guide RNA
ccugaucuuucugcccacccug

SEQ ID NO: 35412 - RNA, 22 nt, Artificial Sequence
  GATA2 Guide RNA
ccugauuauuaccgguggggua

SEQ ID NO: 35413 - RNA, 22 nt, Artificial Sequence
  GATA2 Guide RNA
ccuguagggucuguccgguggg

SEQ ID NO: 35414 - RNA, 22 nt, Artificial Sequence
  GATA2 Guide RNA
ccugugaggguucccuguaggg

SEQ ID NO: 35415 - RNA, 22 nt, Artificial Sequence
  GATA2 Guide RNA
ccugugggucccagacccuccc

SEQ ID NO: 35416 - RNA, 22 nt, Artificial Sequence
  GATA2 Guide RNA
ccuucagcuuggacugacauuc

SEQ ID NO: 35417 - RNA, 22 nt, Artificial Sequence
  GATA2 Guide RNA
ccuucuaugccacuuguccuuc

SEQ ID NO: 35418 - RNA, 22 nt, Artificial Sequence
  GATA2 Guide RNA
cgacucccagaaccagcaguca

SEQ ID NO: 35419 - RNA, 22 nt, Artificial Sequence
  GATA2 Guide RNA
cgauuggggagggucugggacc

SEQ ID NO: 35420 - RNA, 22 nt, Artificial Sequence
  GATA2 Guide RNA
cgccccugacagacauugagau

SEQ ID NO: 35421 - RNA, 22 nt, Artificial Sequence
  GATA2 Guide RNA
cggacagacccuacagggaacc

SEQ ID NO: 35422 - RNA, 22 nt, Artificial Sequence
  GATA2 Guide RNA
cggccgauuggggagggucugg

SEQ ID NO: 35423 - RNA, 22 nt, Artificial Sequence
  GATA2 Guide RNA
cgggcaaagagagagaggauca

SEQ ID NO: 35424 - RNA, 22 nt, Artificial Sequence
  GATA2 Guide RNA
cgguaauaaucaggaaugucag

SEQ ID NO: 35425 - RNA, 22 nt, Artificial Sequence
  GATA2 Guide RNA
cggugggguauuauguuucugg

SEQ ID NO: 35426 - RNA, 22 nt, Artificial Sequence
  GATA2 Guide RNA
cggugggguuccuucuaugcca

SEQ ID NO: 35427 - RNA, 22 nt, Artificial Sequence
  GATA2 Guide RNA
cgucccuagcucugccuacccu

SEQ ID NO: 35428 - RNA, 22 nt, Artificial Sequence
  GATA2 Guide RNA
cgugaucucaaugucugucagg

SEQ ID NO: 35429 - RNA, 22 nt, Artificial Sequence
  GATA2 Guide RNA
cuacagggaacccucacaggcc

SEQ ID NO: 35430 - RNA, 22 nt, Artificial Sequence
  GATA2 Guide RNA
cuacccugaucuuucugcccac

SEQ ID NO: 35431 - RNA, 22 nt, Artificial Sequence
  GATA2 Guide RNA
cuagcucugccuacccugaucu

SEQ ID NO: 35432 - RNA, 22 nt, Artificial Sequence
  GATA2 Guide RNA
cuagggacgccccugacagaca

SEQ ID NO: 35433 - RNA, 22 nt, Artificial Sequence
  GATA2 Guide RNA
cuaugccacuuguccuucagcu

SEQ ID NO: 35434 - RNA, 22 nt, Artificial Sequence
  GATA2 Guide RNA
cucaaugucugucaggggcguc

SEQ ID NO: 35435 - RNA, 22 nt, Artificial Sequence
  GATA2 Guide RNA
cucacaggccagcuggaagugg

SEQ ID NO: 35436 - RNA, 22 nt, Artificial Sequence
  GATA2 Guide RNA
cucccagaaccagcagucaucc

SEQ ID NO: 35437 - RNA, 22 nt, Artificial Sequence
  GATA2 Guide RNA
cuccccaaagaaagccagaaac

SEQ ID NO: 35438 - RNA, 22 nt, Artificial Sequence
  GATA2 Guide RNA
cuccccaaucggccgcugcucc

SEQ ID NO: 35439 - RNA, 22 nt, Artificial Sequence
  GATA2 Guide RNA
cucugccuacccugaucuuucu

SEQ ID NO: 35440 - RNA, 22 nt, Artificial Sequence
  GATA2 Guide RNA
cugaaggacaaguggcauagaa

SEQ ID NO: 35441 - RNA, 22 nt, Artificial Sequence
  GATA2 Guide RNA
cugacagacauugagaucacga

SEQ ID NO: 35442 - RNA, 22 nt, Artificial Sequence
  GATA2 Guide RNA
cugacauuccugauuauuaccg

SEQ ID NO: 35443 - RNA, 22 nt, Artificial Sequence
  GATA2 Guide RNA
cugaucuuucugcccacccuga

SEQ ID NO: 35444 - RNA, 22 nt, Artificial Sequence
  GATA2 Guide RNA
cugauuauuaccggugggguau

SEQ ID NO: 35445 - RNA, 22 nt, Artificial Sequence
  GATA2 Guide RNA
cugcccacccugauccucucuc

SEQ ID NO: 35446 - RNA, 22 nt, Artificial Sequence
  GATA2 Guide RNA
cugcccacuuccagcuggccug

SEQ ID NO: 35447 - RNA, 22 nt, Artificial Sequence
  GATA2 Guide RNA
cugccuacccugaucuuucugc

SEQ ID NO: 35448 - RNA, 22 nt, Artificial Sequence
  GATA2 Guide RNA
cugcugguucugggagucguga

SEQ ID NO: 35449 - RNA, 22 nt, Artificial Sequence
  GATA2 Guide RNA
cuggaagugggcagaaacccug

SEQ ID NO: 35450 - RNA, 22 nt, Artificial Sequence
  GATA2 Guide RNA
cuggccugugaggguucccugu

SEQ ID NO: 35451 - RNA, 22 nt, Artificial Sequence
  GATA2 Guide RNA
cuggcuuucuuuggggagggga

SEQ ID NO: 35452 - RNA, 22 nt, Artificial Sequence
  GATA2 Guide RNA
cugggacccacaggguuucugc

SEQ ID NO: 35453 - RNA, 22 nt, Artificial Sequence
  GATA2 Guide RNA
cugggagucgugaucucaaugu

SEQ ID NO: 35454 - RNA, 22 nt, Artificial Sequence
  GATA2 Guide RNA
cugguucugggagucgugaucu

SEQ ID NO: 35455 - RNA, 22 nt, Artificial Sequence
  GATA2 Guide RNA
cuguagggucuguccggugggg

SEQ ID NO: 35456 - RNA, 22 nt, Artificial Sequence
  GATA2 Guide RNA
cugucaggggcgucccuagcuc

SEQ ID NO: 35457 - RNA, 22 nt, Artificial Sequence
  GATA2 Guide RNA
cuguccggugggguuccuucua

SEQ ID NO: 35458 - RNA, 22 nt, Artificial Sequence
  GATA2 Guide RNA
cugugaggguucccuguagggu

SEQ ID NO: 35459 - RNA, 22 nt, Artificial Sequence
  GATA2 Guide RNA
cugugggucccagacccucccc

SEQ ID NO: 35460 - RNA, 22 nt, Artificial Sequence
  GATA2 Guide RNA
cuucagcuuggacugacauucc

SEQ ID NO: 35461 - RNA, 22 nt, Artificial Sequence
  GATA2 Guide RNA
cuuccagcuggccugugagggu

SEQ ID NO: 35462 - RNA, 22 nt, Artificial Sequence
  GATA2 Guide RNA
cuucuaugccacuuguccuuca

SEQ ID NO: 35463 - RNA, 22 nt, Artificial Sequence
  GATA2 Guide RNA
cuuggacugacauuccugauua

SEQ ID NO: 35464 - RNA, 22 nt, Artificial Sequence
  GATA2 Guide RNA
cuuguccuucagcuuggacuga

SEQ ID NO: 35465 - RNA, 22 nt, Artificial Sequence
  GATA2 Guide RNA
cuuucugcccacccugauccuc

SEQ ID NO: 35466 - RNA, 22 nt, Artificial Sequence
  GATA2 Guide RNA
cuuucuuuggggaggggaugac

SEQ ID NO: 35467 - RNA, 22 nt, Artificial Sequence
  GATA2 Guide RNA
cuuuggggaggggaugacugcu

SEQ ID NO: 35468 - RNA, 22 nt, Artificial Sequence
  GATA2 Guide RNA
gaaacauaauaccccaccggua

SEQ ID NO: 35469 - RNA, 22 nt, Artificial Sequence
  GATA2 Guide RNA
gaaacccugugggucccagacc

SEQ ID NO: 35470 - RNA, 22 nt, Artificial Sequence
  GATA2 Guide RNA
gaaagaucaggguaggcagagc

SEQ ID NO: 35471 - RNA, 22 nt, Artificial Sequence
  GATA2 Guide RNA
gaaagccagaaacauaauaccc

SEQ ID NO: 35472 - RNA, 22 nt, Artificial Sequence
  GATA2 Guide RNA
gaaccagcagucauccccuccc

SEQ ID NO: 35473 - RNA, 22 nt, Artificial Sequence
  GATA2 Guide RNA
gaaccccaccggacagacccua

SEQ ID NO: 35474 - RNA, 22 nt, Artificial Sequence
  GATA2 Guide RNA
gaacccucacaggccagcugga

SEQ ID NO: 35475 - RNA, 22 nt, Artificial Sequence
  GATA2 Guide RNA
gaaggaaccccaccggacagac

SEQ ID NO: 35476 - RNA, 22 nt, Artificial Sequence
  GATA2 Guide RNA
gaaggacaaguggcauagaagg

SEQ ID NO: 35477 - RNA, 22 nt, Artificial Sequence
  GATA2 Guide RNA
gaagugggcagaaacccugugg

SEQ ID NO: 35478 - RNA, 22 nt, Artificial Sequence
  GATA2 Guide RNA
gaaugucaguccaagcugaagg

SEQ ID NO: 35479 - RNA, 22 nt, Artificial Sequence
  GATA2 Guide RNA
gacaaguggcauagaaggaacc

SEQ ID NO: 35480 - RNA, 22 nt, Artificial Sequence
  GATA2 Guide RNA
gacagacauugagaucacgacu

SEQ ID NO: 35481 - RNA, 22 nt, Artificial Sequence
  GATA2 Guide RNA
gacagacccuacagggaacccu

SEQ ID NO: 35482 - RNA, 22 nt, Artificial Sequence
  GATA2 Guide RNA
gacauuccugauuauuaccggu

SEQ ID NO: 35483 - RNA, 22 nt, Artificial Sequence
  GATA2 Guide RNA
gacauugagaucacgacuccca

SEQ ID NO: 35484 - RNA, 22 nt, Artificial Sequence
  GATA2 Guide RNA
gacccacaggguuucugcccac

SEQ ID NO: 35485 - RNA, 22 nt, Artificial Sequence
  GATA2 Guide RNA
gacccuacagggaacccucaca

SEQ ID NO: 35486 - RNA, 22 nt, Artificial Sequence
  GATA2 Guide RNA
gacccuccccaaucggccgcug

SEQ ID NO: 35487 - RNA, 22 nt, Artificial Sequence
  GATA2 Guide RNA
gacgccccugacagacauugag

SEQ ID NO: 35488 - RNA, 22 nt, Artificial Sequence
  GATA2 Guide RNA
gacucccagaaccagcagucau

SEQ ID NO: 35489 - RNA, 22 nt, Artificial Sequence
  GATA2 Guide RNA
gacugacauuccugauuauuac

SEQ ID NO: 35490 - RNA, 22 nt, Artificial Sequence
  GATA2 Guide RNA
gacugcugguucugggagucgu

SEQ ID NO: 35491 - RNA, 22 nt, Artificial Sequence
  GATA2 Guide RNA
gagagagaggaucagggugggc

SEQ ID NO: 35492 - RNA, 22 nt, Artificial Sequence
  GATA2 Guide RNA
gagagaggaucagggugggcag

SEQ ID NO: 35493 - RNA, 22 nt, Artificial Sequence
  GATA2 Guide RNA
gagaggaucagggugggcagaa

SEQ ID NO: 35494 - RNA, 22 nt, Artificial Sequence
  GATA2 Guide RNA
gagaggugggagcagcggccga

SEQ ID NO: 35495 - RNA, 22 nt, Artificial Sequence
  GATA2 Guide RNA
gagaucacgacucccagaacca

SEQ ID NO: 35496 - RNA, 22 nt, Artificial Sequence
  GATA2 Guide RNA
gagcagcggccgauuggggagg

SEQ ID NO: 35497 - RNA, 22 nt, Artificial Sequence
  GATA2 Guide RNA
gagcuagggacgccccugacag

SEQ ID NO: 35498 - RNA, 22 nt, Artificial Sequence
  GATA2 Guide RNA
gaggaucagggugggcagaaag

SEQ ID NO: 35499 - RNA, 22 nt, Artificial Sequence
  GATA2 Guide RNA
gaggggaugacugcugguucug

SEQ ID NO: 35500 - RNA, 22 nt, Artificial Sequence
  GATA2 Guide RNA
gagggucugggacccacagggu

SEQ ID NO: 35501 - RNA, 22 nt, Artificial Sequence
  GATA2 Guide RNA
gaggguucccuguagggucugu

SEQ ID NO: 35502 - RNA, 22 nt, Artificial Sequence
  GATA2 Guide RNA
gaggugggagcagcggccgauu

SEQ ID NO: 35503 - RNA, 22 nt, Artificial Sequence
  GATA2 Guide RNA
gagucgugaucucaaugucugu

SEQ ID NO: 35504 - RNA, 22 nt, Artificial Sequence
  GATA2 Guide RNA
gaucacgacucccagaaccagc

SEQ ID NO: 35505 - RNA, 22 nt, Artificial Sequence
  GATA2 Guide RNA
gaucaggguaggcagagcuagg

SEQ ID NO: 35506 - RNA, 22 nt, Artificial Sequence
  GATA2 Guide RNA
gaucagggugggcagaaagauc

SEQ ID NO: 35507 - RNA, 22 nt, Artificial Sequence
  GATA2 Guide RNA
gaucucaaugucugucaggggc

SEQ ID NO: 35508 - RNA, 22 nt, Artificial Sequence
  GATA2 Guide RNA
gaucuuucugcccacccugauc

SEQ ID NO: 35509 - RNA, 22 nt, Artificial Sequence
  GATA2 Guide RNA
gaugacugcugguucugggagu

SEQ ID NO: 35510 - RNA, 22 nt, Artificial Sequence
  GATA2 Guide RNA
gauuauuaccggugggguauua

SEQ ID NO: 35511 - RNA, 22 nt, Artificial Sequence
  GATA2 Guide RNA
gauuggggagggucugggaccc

SEQ ID NO: 35512 - RNA, 22 nt, Artificial Sequence
  GATA2 Guide RNA
gcaaagagagagaggaucaggg

SEQ ID NO: 35513 - RNA, 22 nt, Artificial Sequence
  GATA2 Guide RNA
gcagaaacccugugggucccag

SEQ ID NO: 35514 - RNA, 22 nt, Artificial Sequence
  GATA2 Guide RNA
gcagaaagaucaggguaggcag

SEQ ID NO: 35515 - RNA, 22 nt, Artificial Sequence
  GATA2 Guide RNA
gcagagcuagggacgccccuga

SEQ ID NO: 35516 - RNA, 22 nt, Artificial Sequence
  GATA2 Guide RNA
gcagcggccgauuggggagggu

SEQ ID NO: 35517 - RNA, 22 nt, Artificial Sequence
  GATA2 Guide RNA
gcagucauccccuccccaaaga

SEQ ID NO: 35518 - RNA, 22 nt, Artificial Sequence
  GATA2 Guide RNA
gcauagaaggaaccccaccgga

SEQ ID NO: 35519 - RNA, 22 nt, Artificial Sequence
  GATA2 Guide RNA
gccacuuguccuucagcuugga

SEQ ID NO: 35520 - RNA, 22 nt, Artificial Sequence
  GATA2 Guide RNA
gccagaaacauaauaccccacc

SEQ ID NO: 35521 - RNA, 22 nt, Artificial Sequence
  GATA2 Guide RNA
gccagcuggaagugggcagaaa

SEQ ID NO: 35522 - RNA, 22 nt, Artificial Sequence
  GATA2 Guide RNA
gcccacccugauccucucucuc

SEQ ID NO: 35523 - RNA, 22 nt, Artificial Sequence
  GATA2 Guide RNA
gcccacuuccagcuggccugug

SEQ ID NO: 35524 - RNA, 22 nt, Artificial Sequence
  GATA2 Guide RNA
gccccugacagacauugagauc

SEQ ID NO: 35525 - RNA, 22 nt, Artificial Sequence
  GATA2 Guide RNA
gccgauuggggagggucuggga

SEQ ID NO: 35526 - RNA, 22 nt, Artificial Sequence
  GATA2 Guide RNA
gccuacccugaucuuucugccc

SEQ ID NO: 35527 - RNA, 22 nt, Artificial Sequence
  GATA2 Guide RNA
gccugugaggguucccuguagg

SEQ ID NO: 35528 - RNA, 22 nt, Artificial Sequence
  GATA2 Guide RNA
gcggccgauuggggagggucug

SEQ ID NO: 35529 - RNA, 22 nt, Artificial Sequence
  GATA2 Guide RNA
gcgggcaaagagagagaggauc

SEQ ID NO: 35530 - RNA, 22 nt, Artificial Sequence
  GATA2 Guide RNA
gcgucccuagcucugccuaccc

SEQ ID NO: 35531 - RNA, 22 nt, Artificial Sequence
  GATA2 Guide RNA
gcuagggacgccccugacagac

SEQ ID NO: 35532 - RNA, 22 nt, Artificial Sequence
  GATA2 Guide RNA
gcucugccuacccugaucuuuc

SEQ ID NO: 35533 - RNA, 22 nt, Artificial Sequence
  GATA2 Guide RNA
gcugaaggacaaguggcauaga

SEQ ID NO: 35534 - RNA, 22 nt, Artificial Sequence
  GATA2 Guide RNA
gcuggaagugggcagaaacccu

SEQ ID NO: 35535 - RNA, 22 nt, Artificial Sequence
  GATA2 Guide RNA
gcuggccugugaggguucccug

SEQ ID NO: 35536 - RNA, 22 nt, Artificial Sequence
  GATA2 Guide RNA
gcugguucugggagucgugauc

SEQ ID NO: 35537 - RNA, 22 nt, Artificial Sequence
  GATA2 Guide RNA
gcuuggacugacauuccugauu

SEQ ID NO: 35538 - RNA, 22 nt, Artificial Sequence
  GATA2 Guide RNA
gcuuucuuuggggaggggauga

SEQ ID NO: 35539 - RNA, 22 nt, Artificial Sequence
  GATA2 Guide RNA
ggaaccccaccggacagacccu

SEQ ID NO: 35540 - RNA, 22 nt, Artificial Sequence
  GATA2 Guide RNA
ggaacccucacaggccagcugg

SEQ ID NO: 35541 - RNA, 22 nt, Artificial Sequence
  GATA2 Guide RNA
ggaagugggcagaaacccugug

SEQ ID NO: 35542 - RNA, 22 nt, Artificial Sequence
  GATA2 Guide RNA
ggaaugucaguccaagcugaag

SEQ ID NO: 35543 - RNA, 22 nt, Artificial Sequence
  GATA2 Guide RNA
ggacaaguggcauagaaggaac

SEQ ID NO: 35544 - RNA, 22 nt, Artificial Sequence
  GATA2 Guide RNA
ggacagacccuacagggaaccc

SEQ ID NO: 35545 - RNA, 22 nt, Artificial Sequence
  GATA2 Guide RNA
ggacccacaggguuucugccca

SEQ ID NO: 35546 - RNA, 22 nt, Artificial Sequence
  GATA2 Guide RNA
ggacgccccugacagacauuga

SEQ ID NO: 35547 - RNA, 22 nt, Artificial Sequence
  GATA2 Guide RNA
ggacugacauuccugauuauua

SEQ ID NO: 35548 - RNA, 22 nt, Artificial Sequence
  GATA2 Guide RNA
ggagaggugggagcagcggccg

SEQ ID NO: 35549 - RNA, 22 nt, Artificial Sequence
  GATA2 Guide RNA
ggagcagcggccgauuggggag

SEQ ID NO: 35550 - RNA, 22 nt, Artificial Sequence
  GATA2 Guide RNA
ggaggggaugacugcugguucu

SEQ ID NO: 35551 - RNA, 22 nt, Artificial Sequence
  GATA2 Guide RNA
ggagggucugggacccacaggg

SEQ ID NO: 35552 - RNA, 22 nt, Artificial Sequence
  GATA2 Guide RNA
ggagucgugaucucaaugucug

SEQ ID NO: 35553 - RNA, 22 nt, Artificial Sequence
  GATA2 Guide RNA
ggaucagggugggcagaaagau

SEQ ID NO: 35554 - RNA, 22 nt, Artificial Sequence
  GATA2 Guide RNA
ggaugacugcugguucugggag

SEQ ID NO: 35555 - RNA, 22 nt, Artificial Sequence
  GATA2 Guide RNA
ggcaaagagagagaggaucagg

SEQ ID NO: 35556 - RNA, 22 nt, Artificial Sequence
  GATA2 Guide RNA
ggcagaaacccuguggguccca

SEQ ID NO: 35557 - RNA, 22 nt, Artificial Sequence
  GATA2 Guide RNA
ggcagaaagaucaggguaggca

SEQ ID NO: 35558 - RNA, 22 nt, Artificial Sequence
  GATA2 Guide RNA
ggcagagcuagggacgccccug

SEQ ID NO: 35559 - RNA, 22 nt, Artificial Sequence
  GATA2 Guide RNA
ggcauagaaggaaccccaccgg

SEQ ID NO: 35560 - RNA, 22 nt, Artificial Sequence
  GATA2 Guide RNA
ggccagcuggaagugggcagaa

SEQ ID NO: 35561 - RNA, 22 nt, Artificial Sequence
  GATA2 Guide RNA
ggccgauuggggagggucuggg

SEQ ID NO: 35562 - RNA, 22 nt, Artificial Sequence
  GATA2 Guide RNA
ggccugugaggguucccuguag

SEQ ID NO: 35563 - RNA, 22 nt, Artificial Sequence
  GATA2 Guide RNA
ggcgucccuagcucugccuacc

SEQ ID NO: 35564 - RNA, 22 nt, Artificial Sequence
  GATA2 Guide RNA
ggcuuucuuuggggaggggaug

SEQ ID NO: 35565 - RNA, 22 nt, Artificial Sequence
  GATA2 Guide RNA
gggaacccucacaggccagcug

SEQ ID NO: 35566 - RNA, 22 nt, Artificial Sequence
  GATA2 Guide RNA
gggacccacaggguuucugccc

SEQ ID NO: 35567 - RNA, 22 nt, Artificial Sequence
  GATA2 Guide RNA
gggacgccccugacagacauug

SEQ ID NO: 35568 - RNA, 22 nt, Artificial Sequence
  GATA2 Guide RNA
gggagaggugggagcagcggcc

SEQ ID NO: 35569 - RNA, 22 nt, Artificial Sequence
  GATA2 Guide RNA
gggagcagcggccgauugggga

SEQ ID NO: 35570 - RNA, 22 nt, Artificial Sequence
  GATA2 Guide RNA
gggaggggaugacugcugguuc

SEQ ID NO: 35571 - RNA, 22 nt, Artificial Sequence
  GATA2 Guide RNA
gggagggucugggacccacagg

SEQ ID NO: 35572 - RNA, 22 nt, Artificial Sequence
  GATA2 Guide RNA
gggagucgugaucucaaugucu

SEQ ID NO: 35573 - RNA, 22 nt, Artificial Sequence
  GATA2 Guide RNA
gggaugacugcugguucuggga

SEQ ID NO: 35574 - RNA, 22 nt, Artificial Sequence
  GATA2 Guide RNA
gggcaaagagagagaggaucag

SEQ ID NO: 35575 - RNA, 22 nt, Artificial Sequence
  GATA2 Guide RNA
gggcagaaacccuguggguccc

SEQ ID NO: 35576 - RNA, 22 nt, Artificial Sequence
  GATA2 Guide RNA
gggcagaaagaucaggguaggc

SEQ ID NO: 35577 - RNA, 22 nt, Artificial Sequence
  GATA2 Guide RNA
gggcgucccuagcucugccuac

SEQ ID NO: 35578 - RNA, 22 nt, Artificial Sequence
  GATA2 Guide RNA
ggggaggggaugacugcugguu

SEQ ID NO: 35579 - RNA, 22 nt, Artificial Sequence
  GATA2 Guide RNA
ggggagggucugggacccacag

SEQ ID NO: 35580 - RNA, 22 nt, Artificial Sequence
  GATA2 Guide RNA
ggggaugacugcugguucuggg

SEQ ID NO: 35581 - RNA, 22 nt, Artificial Sequence
  GATA2 Guide RNA
ggggcgucccuagcucugccua

SEQ ID NO: 35582 - RNA, 22 nt, Artificial Sequence
  GATA2 Guide RNA
gggguauuauguuucuggcuuu

SEQ ID NO: 35583 - RNA, 22 nt, Artificial Sequence
  GATA2 Guide RNA
gggguuccuucuaugccacuug

SEQ ID NO: 35584 - RNA, 22 nt, Artificial Sequence
  GATA2 Guide RNA
ggguaggcagagcuagggacgc

SEQ ID NO: 35585 - RNA, 22 nt, Artificial Sequence
  GATA2 Guide RNA
ggguauuauguuucuggcuuuc

SEQ ID NO: 35586 - RNA, 22 nt, Artificial Sequence
  GATA2 Guide RNA
gggucccagacccuccccaauc

SEQ ID NO: 35587 - RNA, 22 nt, Artificial Sequence
  GATA2 Guide RNA
gggucugggacccacaggguuu

SEQ ID NO: 35588 - RNA, 22 nt, Artificial Sequence
  GATA2 Guide RNA
gggucuguccggugggguuccu

SEQ ID NO: 35589 - RNA, 22 nt, Artificial Sequence
  GATA2 Guide RNA
gggugggcagaaagaucagggu

SEQ ID NO: 35590 - RNA, 22 nt, Artificial Sequence
  GATA2 Guide RNA
ggguucccuguagggucugucc

SEQ ID NO: 35591 - RNA, 22 nt, Artificial Sequence
  GATA2 Guide RNA
ggguuccuucuaugccacuugu

SEQ ID NO: 35592 - RNA, 22 nt, Artificial Sequence
  GATA2 Guide RNA
ggguuucugcccacuuccagcu

SEQ ID NO: 35593 - RNA, 22 nt, Artificial Sequence
  GATA2 Guide RNA
gguaauaaucaggaaugucagu

SEQ ID NO: 35594 - RNA, 22 nt, Artificial Sequence
  GATA2 Guide RNA
gguaggcagagcuagggacgcc

SEQ ID NO: 35595 - RNA, 22 nt, Artificial Sequence
  GATA2 Guide RNA
gguauuauguuucuggcuuucu

SEQ ID NO: 35596 - RNA, 22 nt, Artificial Sequence
  GATA2 Guide RNA
ggucccagacccuccccaaucg

SEQ ID NO: 35597 - RNA, 22 nt, Artificial Sequence
  GATA2 Guide RNA
ggucugggacccacaggguuuc

SEQ ID NO: 35598 - RNA, 22 nt, Artificial Sequence
  GATA2 Guide RNA
ggucuguccggugggguuccuu

SEQ ID NO: 35599 - RNA, 22 nt, Artificial Sequence
  GATA2 Guide RNA
ggugggagcagcggccgauugg

SEQ ID NO: 35600 - RNA, 22 nt, Artificial Sequence
  GATA2 Guide RNA
ggugggcagaaagaucagggua

SEQ ID NO: 35601 - RNA, 22 nt, Artificial Sequence
  GATA2 Guide RNA
ggugggguauuauguuucuggc

SEQ ID NO: 35602 - RNA, 22 nt, Artificial Sequence
  GATA2 Guide RNA
ggugggguuccuucuaugccac

SEQ ID NO: 35603 - RNA, 22 nt, Artificial Sequence
  GATA2 Guide RNA
gguucccuguagggucuguccg

SEQ ID NO: 35604 - RNA, 22 nt, Artificial Sequence
  GATA2 Guide RNA
gguuccuucuaugccacuuguc

SEQ ID NO: 35605 - RNA, 22 nt, Artificial Sequence
  GATA2 Guide RNA
gguucugggagucgugaucuca

SEQ ID NO: 35606 - RNA, 22 nt, Artificial Sequence
  GATA2 Guide RNA
gguuucugcccacuuccagcug

SEQ ID NO: 35607 - RNA, 22 nt, Artificial Sequence
  GATA2 Guide RNA
guaauaaucaggaaugucaguc

SEQ ID NO: 35608 - RNA, 22 nt, Artificial Sequence
  GATA2 Guide RNA
guaggcagagcuagggacgccc

SEQ ID NO: 35609 - RNA, 22 nt, Artificial Sequence
  GATA2 Guide RNA
guagggucuguccggugggguu

SEQ ID NO: 35610 - RNA, 22 nt, Artificial Sequence
  GATA2 Guide RNA
guauuauguuucuggcuuucuu

SEQ ID NO: 35611 - RNA, 22 nt, Artificial Sequence
  GATA2 Guide RNA
gucaggggcgucccuagcucug

SEQ ID NO: 35612 - RNA, 22 nt, Artificial Sequence
  GATA2 Guide RNA
gucaguccaagcugaaggacaa

SEQ ID NO: 35613 - RNA, 22 nt, Artificial Sequence
  GATA2 Guide RNA
gucauccccuccccaaagaaag

SEQ ID NO: 35614 - RNA, 22 nt, Artificial Sequence
  GATA2 Guide RNA
guccaagcugaaggacaagugg

SEQ ID NO: 35615 - RNA, 22 nt, Artificial Sequence
  GATA2 Guide RNA
gucccagacccuccccaaucgg

SEQ ID NO: 35616 - RNA, 22 nt, Artificial Sequence
  GATA2 Guide RNA
gucccuagcucugccuacccug

SEQ ID NO: 35617 - RNA, 22 nt, Artificial Sequence
  GATA2 Guide RNA
guccggugggguuccuucuaug

SEQ ID NO: 35618 - RNA, 22 nt, Artificial Sequence
  GATA2 Guide RNA
guccuucagcuuggacugacau

SEQ ID NO: 35619 - RNA, 22 nt, Artificial Sequence
  GATA2 Guide RNA
gucgugaucucaaugucuguca

SEQ ID NO: 35620 - RNA, 22 nt, Artificial Sequence
  GATA2 Guide RNA
gucugggacccacaggguuucu

SEQ ID NO: 35621 - RNA, 22 nt, Artificial Sequence
  GATA2 Guide RNA
gucugucaggggcgucccuagc

SEQ ID NO: 35622 - RNA, 22 nt, Artificial Sequence
  GATA2 Guide RNA
gucuguccggugggguuccuuc

SEQ ID NO: 35623 - RNA, 22 nt, Artificial Sequence
  GATA2 Guide RNA
gugaggguucccuguagggucu

SEQ ID NO: 35624 - RNA, 22 nt, Artificial Sequence
  GATA2 Guide RNA
gugaucucaaugucugucaggg

SEQ ID NO: 35625 - RNA, 22 nt, Artificial Sequence
  GATA2 Guide RNA
guggcauagaaggaaccccacc

SEQ ID NO: 35626 - RNA, 22 nt, Artificial Sequence
  GATA2 Guide RNA
gugggagcagcggccgauuggg

SEQ ID NO: 35627 - RNA, 22 nt, Artificial Sequence
  GATA2 Guide RNA
gugggcagaaacccuguggguc

SEQ ID NO: 35628 - RNA, 22 nt, Artificial Sequence
  GATA2 Guide RNA
gugggcagaaagaucaggguag

SEQ ID NO: 35629 - RNA, 22 nt, Artificial Sequence
  GATA2 Guide RNA
gugggguauuauguuucuggcu

SEQ ID NO: 35630 - RNA, 22 nt, Artificial Sequence
  GATA2 Guide RNA
gugggguuccuucuaugccacu

SEQ ID NO: 35631 - RNA, 22 nt, Artificial Sequence
  GATA2 Guide RNA
gugggucccagacccuccccaa

SEQ ID NO: 35632 - RNA, 22 nt, Artificial Sequence
  GATA2 Guide RNA
guucccuguagggucuguccgg

SEQ ID NO: 35633 - RNA, 22 nt, Artificial Sequence
  GATA2 Guide RNA
guuccuucuaugccacuugucc

SEQ ID NO: 35634 - RNA, 22 nt, Artificial Sequence
  GATA2 Guide RNA
guucugggagucgugaucucaa

SEQ ID NO: 35635 - RNA, 22 nt, Artificial Sequence
  GATA2 Guide RNA
guuucugcccacuuccagcugg

SEQ ID NO: 35636 - RNA, 22 nt, Artificial Sequence
  GATA2 Guide RNA
guuucuggcuuucuuuggggag

SEQ ID NO: 35637 - RNA, 22 nt, Artificial Sequence
  GATA2 Guide RNA
uaauaaucaggaaugucagucc

SEQ ID NO: 35638 - RNA, 22 nt, Artificial Sequence
  GATA2 Guide RNA
uaauaccccaccgguaauaauc

SEQ ID NO: 35639 - RNA, 22 nt, Artificial Sequence
  GATA2 Guide RNA
uaaucaggaaugucaguccaag

SEQ ID NO: 35640 - RNA, 22 nt, Artificial Sequence
  GATA2 Guide RNA
uacagggaacccucacaggcca

SEQ ID NO: 35641 - RNA, 22 nt, Artificial Sequence
  GATA2 Guide RNA
uaccccaccgguaauaaucagg

SEQ ID NO: 35642 - RNA, 22 nt, Artificial Sequence
  GATA2 Guide RNA
uacccugaucuuucugcccacc

SEQ ID NO: 35643 - RNA, 22 nt, Artificial Sequence
  GATA2 Guide RNA
uaccggugggguauuauguuuc

SEQ ID NO: 35644 - RNA, 22 nt, Artificial Sequence
  GATA2 Guide RNA
uagaaggaaccccaccggacag

SEQ ID NO: 35645 - RNA, 22 nt, Artificial Sequence
  GATA2 Guide RNA
uagcucugccuacccugaucuu

SEQ ID NO: 35646 - RNA, 22 nt, Artificial Sequence
  GATA2 Guide RNA
uaggcagagcuagggacgcccc

SEQ ID NO: 35647 - RNA, 22 nt, Artificial Sequence
  GATA2 Guide RNA
uagggacgccccugacagacau

SEQ ID NO: 35648 - RNA, 22 nt, Artificial Sequence
  GATA2 Guide RNA
uagggucuguccggugggguuc

SEQ ID NO: 35649 - RNA, 22 nt, Artificial Sequence
  GATA2 Guide RNA
uaugccacuuguccuucagcuu

SEQ ID NO: 35650 - RNA, 22 nt, Artificial Sequence
  GATA2 Guide RNA
uauguuucuggcuuucuuuggg

SEQ ID NO: 35651 - RNA, 22 nt, Artificial Sequence
  GATA2 Guide RNA
uauuaccggugggguauuaugu

SEQ ID NO: 35652 - RNA, 22 nt, Artificial Sequence
  GATA2 Guide RNA
ucaaugucugucaggggcgucc

SEQ ID NO: 35653 - RNA, 22 nt, Artificial Sequence
  GATA2 Guide RNA
ucacaggccagcuggaaguggg

SEQ ID NO: 35654 - RNA, 22 nt, Artificial Sequence
  GATA2 Guide RNA
ucacgacucccagaaccagcag

SEQ ID NO: 35655 - RNA, 22 nt, Artificial Sequence
  GATA2 Guide RNA
ucagcuuggacugacauuccug

SEQ ID NO: 35656 - RNA, 22 nt, Artificial Sequence
  GATA2 Guide RNA
ucaggaaugucaguccaagcug

SEQ ID NO: 35657 - RNA, 22 nt, Artificial Sequence
  GATA2 Guide RNA
ucaggggcgucccuagcucugc

SEQ ID NO: 35658 - RNA, 22 nt, Artificial Sequence
  GATA2 Guide RNA
ucaggguaggcagagcuaggga

SEQ ID NO: 35659 - RNA, 22 nt, Artificial Sequence
  GATA2 Guide RNA
ucagggugggcagaaagaucag

SEQ ID NO: 35660 - RNA, 22 nt, Artificial Sequence
  GATA2 Guide RNA
ucaguccaagcugaaggacaag

SEQ ID NO: 35661 - RNA, 22 nt, Artificial Sequence
  GATA2 Guide RNA
ucauccccuccccaaagaaagc

SEQ ID NO: 35662 - RNA, 22 nt, Artificial Sequence
  GATA2 Guide RNA
uccaagcugaaggacaaguggc

SEQ ID NO: 35663 - RNA, 22 nt, Artificial Sequence
  GATA2 Guide RNA
uccagcuggccugugaggguuc

SEQ ID NO: 35664 - RNA, 22 nt, Artificial Sequence
  GATA2 Guide RNA
ucccagaaccagcagucauccc

SEQ ID NO: 35665 - RNA, 22 nt, Artificial Sequence
  GATA2 Guide RNA
ucccagacccuccccaaucggc

SEQ ID NO: 35666 - RNA, 22 nt, Artificial Sequence
  GATA2 Guide RNA
uccccaaagaaagccagaaaca

SEQ ID NO: 35667 - RNA, 22 nt, Artificial Sequence
  GATA2 Guide RNA
uccccaaucggccgcugcuccc

SEQ ID NO: 35668 - RNA, 22 nt, Artificial Sequence
  GATA2 Guide RNA
uccccuccccaaagaaagccag

SEQ ID NO: 35669 - RNA, 22 nt, Artificial Sequence
  GATA2 Guide RNA
ucccuagcucugccuacccuga

SEQ ID NO: 35670 - RNA, 22 nt, Artificial Sequence
  GATA2 Guide RNA
ucccuguagggucuguccggug

SEQ ID NO: 35671 - RNA, 22 nt, Artificial Sequence
  GATA2 Guide RNA
uccggugggguuccuucuaugc

SEQ ID NO: 35672 - RNA, 22 nt, Artificial Sequence
  GATA2 Guide RNA
uccugauuauuaccgguggggu

SEQ ID NO: 35673 - RNA, 22 nt, Artificial Sequence
  GATA2 Guide RNA
uccuucagcuuggacugacauu

SEQ ID NO: 35674 - RNA, 22 nt, Artificial Sequence
  GATA2 Guide RNA
uccuucuaugccacuuguccuu

SEQ ID NO: 35675 - RNA, 22 nt, Artificial Sequence
  GATA2 Guide RNA
ucgugaucucaaugucugucag

SEQ ID NO: 35676 - RNA, 22 nt, Artificial Sequence
  GATA2 Guide RNA
ucuaugccacuuguccuucagc

SEQ ID NO: 35677 - RNA, 22 nt, Artificial Sequence
  GATA2 Guide RNA
ucucaaugucugucaggggcgu

SEQ ID NO: 35678 - RNA, 22 nt, Artificial Sequence
  GATA2 Guide RNA
ucugcccacccugauccucucu

SEQ ID NO: 35679 - RNA, 22 nt, Artificial Sequence
  GATA2 Guide RNA
ucugcccacuuccagcuggccu

SEQ ID NO: 35680 - RNA, 22 nt, Artificial Sequence
  GATA2 Guide RNA
ucugccuacccugaucuuucug

SEQ ID NO: 35681 - RNA, 22 nt, Artificial Sequence
  GATA2 Guide RNA
ucuggcuuucuuuggggagggg

SEQ ID NO: 35682 - RNA, 22 nt, Artificial Sequence
  GATA2 Guide RNA
ucugggacccacaggguuucug

SEQ ID NO: 35683 - RNA, 22 nt, Artificial Sequence
  GATA2 Guide RNA
ucugggagucgugaucucaaug

SEQ ID NO: 35684 - RNA, 22 nt, Artificial Sequence
  GATA2 Guide RNA
ucugucaggggcgucccuagcu

SEQ ID NO: 35685 - RNA, 22 nt, Artificial Sequence
  GATA2 Guide RNA
ucuguccggugggguuccuucu

SEQ ID NO: 35686 - RNA, 22 nt, Artificial Sequence
  GATA2 Guide RNA
ucuuucugcccacccugauccu

SEQ ID NO: 35687 - RNA, 22 nt, Artificial Sequence
  GATA2 Guide RNA
ucuuuggggaggggaugacugc

SEQ ID NO: 35688 - RNA, 22 nt, Artificial Sequence
  GATA2 Guide RNA
ugaaggacaaguggcauagaag

SEQ ID NO: 35689 - RNA, 22 nt, Artificial Sequence
  GATA2 Guide RNA
ugacagacauugagaucacgac

SEQ ID NO: 35690 - RNA, 22 nt, Artificial Sequence
  GATA2 Guide RNA
ugacauuccugauuauuaccgg

SEQ ID NO: 35691 - RNA, 22 nt, Artificial Sequence
  GATA2 Guide RNA
ugacugcugguucugggagucg

SEQ ID NO: 35692 - RNA, 22 nt, Artificial Sequence
  GATA2 Guide RNA
ugagaucacgacucccagaacc

SEQ ID NO: 35693 - RNA, 22 nt, Artificial Sequence
  GATA2 Guide RNA
ugaggguucccuguagggucug

SEQ ID NO: 35694 - RNA, 22 nt, Artificial Sequence
  GATA2 Guide RNA
ugaucucaaugucugucagggg

SEQ ID NO: 35695 - RNA, 22 nt, Artificial Sequence
  GATA2 Guide RNA
ugaucuuucugcccacccugau

SEQ ID NO: 35696 - RNA, 22 nt, Artificial Sequence
  GATA2 Guide RNA
ugauuauuaccggugggguauu

SEQ ID NO: 35697 - RNA, 22 nt, Artificial Sequence
  GATA2 Guide RNA
ugccacuuguccuucagcuugg

SEQ ID NO: 35698 - RNA, 22 nt, Artificial Sequence
  GATA2 Guide RNA
ugcccacccugauccucucucu

SEQ ID NO: 35699 - RNA, 22 nt, Artificial Sequence
  GATA2 Guide RNA
ugcccacuuccagcuggccugu

SEQ ID NO: 35700 - RNA, 22 nt, Artificial Sequence
  GATA2 Guide RNA
ugccuacccugaucuuucugcc

SEQ ID NO: 35701 - RNA, 22 nt, Artificial Sequence
  GATA2 Guide RNA
ugcugguucugggagucgugau

SEQ ID NO: 35702 - RNA, 22 nt, Artificial Sequence
  GATA2 Guide RNA
uggaagugggcagaaacccugu

SEQ ID NO: 35703 - RNA, 22 nt, Artificial Sequence
  GATA2 Guide RNA
uggacugacauuccugauuauu

SEQ ID NO: 35704 - RNA, 22 nt, Artificial Sequence
  GATA2 Guide RNA
uggcauagaaggaaccccaccg

SEQ ID NO: 35705 - RNA, 22 nt, Artificial Sequence
  GATA2 Guide RNA
uggccugugaggguucccugua

SEQ ID NO: 35706 - RNA, 22 nt, Artificial Sequence
  GATA2 Guide RNA
uggcuuucuuuggggaggggau

SEQ ID NO: 35707 - RNA, 22 nt, Artificial Sequence
  GATA2 Guide RNA
ugggacccacaggguuucugcc

SEQ ID NO: 35708 - RNA, 22 nt, Artificial Sequence
  GATA2 Guide RNA
ugggagcagcggccgauugggg

SEQ ID NO: 35709 - RNA, 22 nt, Artificial Sequence
  GATA2 Guide RNA
ugggagucgugaucucaauguc

SEQ ID NO: 35710 - RNA, 22 nt, Artificial Sequence
  GATA2 Guide RNA
ugggcagaaacccugugggucc

SEQ ID NO: 35711 - RNA, 22 nt, Artificial Sequence
  GATA2 Guide RNA
ugggcagaaagaucaggguagg

SEQ ID NO: 35712 - RNA, 22 nt, Artificial Sequence
  GATA2 Guide RNA
uggggaggggaugacugcuggu

SEQ ID NO: 35713 - RNA, 22 nt, Artificial Sequence
  GATA2 Guide RNA
uggggagggucugggacccaca

SEQ ID NO: 35714 - RNA, 22 nt, Artificial Sequence
  GATA2 Guide RNA
ugggguauuauguuucuggcuu

SEQ ID NO: 35715 - RNA, 22 nt, Artificial Sequence
  GATA2 Guide RNA
ugggguuccuucuaugccacuu

SEQ ID NO: 35716 - RNA, 22 nt, Artificial Sequence
  GATA2 Guide RNA
ugggucccagacccuccccaau

SEQ ID NO: 35717 - RNA, 22 nt, Artificial Sequence
  GATA2 Guide RNA
ugguucugggagucgugaucuc

SEQ ID NO: 35718 - RNA, 22 nt, Artificial Sequence
  GATA2 Guide RNA
uguagggucuguccgguggggu

SEQ ID NO: 35719 - RNA, 22 nt, Artificial Sequence
  GATA2 Guide RNA
ugucaggggcgucccuagcucu

SEQ ID NO: 35720 - RNA, 22 nt, Artificial Sequence
  GATA2 Guide RNA
ugucaguccaagcugaaggaca

SEQ ID NO: 35721 - RNA, 22 nt, Artificial Sequence
  GATA2 Guide RNA
uguccggugggguuccuucuau

SEQ ID NO: 35722 - RNA, 22 nt, Artificial Sequence
  GATA2 Guide RNA
uguccuucagcuuggacugaca

SEQ ID NO: 35723 - RNA, 22 nt, Artificial Sequence
  GATA2 Guide RNA
ugucugucaggggcgucccuag

SEQ ID NO: 35724 - RNA, 22 nt, Artificial Sequence
  GATA2 Guide RNA
ugugaggguucccuguaggguc

SEQ ID NO: 35725 - RNA, 22 nt, Artificial Sequence
  GATA2 Guide RNA
ugugggucccagacccucccca

SEQ ID NO: 35726 - RNA, 22 nt, Artificial Sequence
  GATA2 Guide RNA
uguuucuggcuuucuuugggga

SEQ ID NO: 35727 - RNA, 22 nt, Artificial Sequence
  GATA2 Guide RNA
uuaccggugggguauuauguuu

SEQ ID NO: 35728 - RNA, 22 nt, Artificial Sequence
  GATA2 Guide RNA
uuauguuucuggcuuucuuugg

SEQ ID NO: 35729 - RNA, 22 nt, Artificial Sequence
  GATA2 Guide RNA
uuauuaccggugggguauuaug

SEQ ID NO: 35730 - RNA, 22 nt, Artificial Sequence
  GATA2 Guide RNA
uucagcuuggacugacauuccu

SEQ ID NO: 35731 - RNA, 22 nt, Artificial Sequence
  GATA2 Guide RNA
uuccagcuggccugugaggguu

SEQ ID NO: 35732 - RNA, 22 nt, Artificial Sequence
  GATA2 Guide RNA
uucccuguagggucuguccggu

SEQ ID NO: 35733 - RNA, 22 nt, Artificial Sequence
  GATA2 Guide RNA
uuccugauuauuaccggugggg

SEQ ID NO: 35734 - RNA, 22 nt, Artificial Sequence
  GATA2 Guide RNA
uuccuucuaugccacuuguccu

SEQ ID NO: 35735 - RNA, 22 nt, Artificial Sequence
  GATA2 Guide RNA
uucuaugccacuuguccuucag

SEQ ID NO: 35736 - RNA, 22 nt, Artificial Sequence
  GATA2 Guide RNA
uucugcccacccugauccucuc

SEQ ID NO: 35737 - RNA, 22 nt, Artificial Sequence
  GATA2 Guide RNA
uucugcccacuuccagcuggcc

SEQ ID NO: 35738 - RNA, 22 nt, Artificial Sequence
  GATA2 Guide RNA
uucuggcuuucuuuggggaggg

SEQ ID NO: 35739 - RNA, 22 nt, Artificial Sequence
  GATA2 Guide RNA
uucugggagucgugaucucaau

SEQ ID NO: 35740 - RNA, 22 nt, Artificial Sequence
  GATA2 Guide RNA
uucuuuggggaggggaugacug

SEQ ID NO: 35741 - RNA, 22 nt, Artificial Sequence
  GATA2 Guide RNA
uugagaucacgacucccagaac

SEQ ID NO: 35742 - RNA, 22 nt, Artificial Sequence
  GATA2 Guide RNA
uuggacugacauuccugauuau

SEQ ID NO: 35743 - RNA, 22 nt, Artificial Sequence
  GATA2 Guide RNA
uuggggaggggaugacugcugg

SEQ ID NO: 35744 - RNA, 22 nt, Artificial Sequence
  GATA2 Guide RNA
uuggggagggucugggacccac

SEQ ID NO: 35745 - RNA, 22 nt, Artificial Sequence
  GATA2 Guide RNA
uuguccuucagcuuggacugac

SEQ ID NO: 35746 - RNA, 22 nt, Artificial Sequence
  GATA2 Guide RNA
uuucugcccacccugauccucu

SEQ ID NO: 35747 - RNA, 22 nt, Artificial Sequence
  GATA2 Guide RNA
uuucugcccacuuccagcuggc

SEQ ID NO: 35748 - RNA, 22 nt, Artificial Sequence
  GATA2 Guide RNA
uuucuggcuuucuuuggggagg

SEQ ID NO: 35749 - RNA, 22 nt, Artificial Sequence
  GATA2 Guide RNA
uuucuuuggggaggggaugacu

SEQ ID NO: 35750 - RNA, 22 nt, Artificial Sequence
  GATA2 Guide RNA
uuuggggaggggaugacugcug

SEQ ID NO: 35751 - RNA, 20 nt, Artificial Sequence
  GATA2 Guide RNA
aacccaggcgccgcgcgcca

SEQ ID NO: 35752 - RNA, 20 nt, Artificial Sequence
  GATA2 Guide RNA
aagcaagcagacgggcccuc

SEQ ID NO: 35753 - RNA, 20 nt, Artificial Sequence
  GATA2 Guide RNA
aagcagacgggcccuccucc

SEQ ID NO: 35754 - RNA, 20 nt, Artificial Sequence
  GATA2 Guide RNA
aaucgagcugcugaaaaauu

SEQ ID NO: 35755 - RNA, 20 nt, Artificial Sequence
  GATA2 Guide RNA
aauuuuucagcagcucgauu

SEQ ID NO: 35756 - RNA, 20 nt, Artificial Sequence
  GATA2 Guide RNA
acauccgggaagcaagcaga

SEQ ID NO: 35757 - RNA, 20 nt, Artificial Sequence
  GATA2 Guide RNA
acgggcccuccuccccuccc

SEQ ID NO: 35758 - RNA, 20 nt, Artificial Sequence
  GATA2 Guide RNA
acugggcccguggugaugag

SEQ ID NO: 35759 - RNA, 20 nt, Artificial Sequence
  GATA2 Guide RNA
agaacccaggcgccgcgcgc

SEQ ID NO: 35760 - RNA, 20 nt, Artificial Sequence
  GATA2 Guide RNA
agacgggcccuccuccccuc

SEQ ID NO: 35761 - RNA, 20 nt, Artificial Sequence
  GATA2 Guide RNA
agcaagcagacgggcccucc

SEQ ID NO: 35762 - RNA, 20 nt, Artificial Sequence
  GATA2 Guide RNA
agcacugggcccguggugau

SEQ ID NO: 35763 - RNA, 20 nt, Artificial Sequence
  GATA2 Guide RNA
agcagacgggcccuccuccc

SEQ ID NO: 35764 - RNA, 20 nt, Artificial Sequence
  GATA2 Guide RNA
agcagcucgauuccugcgga

SEQ ID NO: 35765 - RNA, 20 nt, Artificial Sequence
  GATA2 Guide RNA
agcucgauuccugcggaucc

SEQ ID NO: 35766 - RNA, 20 nt, Artificial Sequence
  GATA2 Guide RNA
aggaaucgagcugcugaaaa

SEQ ID NO: 35767 - RNA, 20 nt, Artificial Sequence
  GATA2 Guide RNA
aggagggcccgucugcuugc

SEQ ID NO: 35768 - RNA, 20 nt, Artificial Sequence
  GATA2 Guide RNA
aggauccgcaggaaucgagc

SEQ ID NO: 35769 - RNA, 20 nt, Artificial Sequence
  GATA2 Guide RNA
aggcgagggaggggaggagg

SEQ ID NO: 35770 - RNA, 20 nt, Artificial Sequence
  GATA2 Guide RNA
agggaggggaggagggcccg

SEQ ID NO: 35771 - RNA, 20 nt, Artificial Sequence
  GATA2 Guide RNA
agggcccgucugcuugcuuc

SEQ ID NO: 35772 - RNA, 20 nt, Artificial Sequence
  GATA2 Guide RNA
aggggaggagggcccgucug

SEQ ID NO: 35773 - RNA, 20 nt, Artificial Sequence
  GATA2 Guide RNA
auccgcaggaaucgagcugc

SEQ ID NO: 35774 - RNA, 20 nt, Artificial Sequence
  GATA2 Guide RNA
auccgggaagcaagcagacg

SEQ ID NO: 35775 - RNA, 20 nt, Artificial Sequence
  GATA2 Guide RNA
auccuacauccgggaagcaa

SEQ ID NO: 35776 - RNA, 20 nt, Artificial Sequence
  GATA2 Guide RNA
augagaacccaggcgccgcg

SEQ ID NO: 35777 - RNA, 20 nt, Artificial Sequence
  GATA2 Guide RNA
auguaggauccgcaggaauc

SEQ ID NO: 35778 - RNA, 20 nt, Artificial Sequence
  GATA2 Guide RNA
auuccugcggauccuacauc

SEQ ID NO: 35779 - RNA, 20 nt, Artificial Sequence
  GATA2 Guide RNA
auuuuucagcagcucgauuc

SEQ ID NO: 35780 - RNA, 20 nt, Artificial Sequence
  GATA2 Guide RNA
caagcagacgggcccuccuc

SEQ ID NO: 35781 - RNA, 20 nt, Artificial Sequence
  GATA2 Guide RNA
caauuuuucagcagcucgau

SEQ ID NO: 35782 - RNA, 20 nt, Artificial Sequence
  GATA2 Guide RNA
cacugggcccguggugauga

SEQ ID NO: 35783 - RNA, 20 nt, Artificial Sequence
  GATA2 Guide RNA
cagacgggcccuccuccccu

SEQ ID NO: 35784 - RNA, 20 nt, Artificial Sequence
  GATA2 Guide RNA
cagcagcucgauuccugcgg

SEQ ID NO: 35785 - RNA, 20 nt, Artificial Sequence
  GATA2 Guide RNA
cagcucgauuccugcggauc

SEQ ID NO: 35786 - RNA, 20 nt, Artificial Sequence
  GATA2 Guide RNA
caggaaucgagcugcugaaa

SEQ ID NO: 35787 - RNA, 20 nt, Artificial Sequence
  GATA2 Guide RNA
caggcgagggaggggaggag

SEQ ID NO: 35788 - RNA, 20 nt, Artificial Sequence
  GATA2 Guide RNA
cauccgggaagcaagcagac

SEQ ID NO: 35789 - RNA, 20 nt, Artificial Sequence
  GATA2 Guide RNA
ccaauuuuucagcagcucga

SEQ ID NO: 35790 - RNA, 20 nt, Artificial Sequence
  GATA2 Guide RNA
ccaggcgagggaggggagga

SEQ ID NO: 35791 - RNA, 20 nt, Artificial Sequence
  GATA2 Guide RNA
cccaauuuuucagcagcucg

SEQ ID NO: 35792 - RNA, 20 nt, Artificial Sequence
  GATA2 Guide RNA
ccccaauuuuucagcagcuc

SEQ ID NO: 35793 - RNA, 20 nt, Artificial Sequence
  GATA2 Guide RNA
cccggauguaggauccgcag

SEQ ID NO: 35794 - RNA, 20 nt, Artificial Sequence
  GATA2 Guide RNA
cccgucugcuugcuucccgg

SEQ ID NO: 35795 - RNA, 20 nt, Artificial Sequence
  GATA2 Guide RNA
cccguggugaugagaaccca

SEQ ID NO: 35796 - RNA, 20 nt, Artificial Sequence
  GATA2 Guide RNA
cccuccuccccucccucgcc

SEQ ID NO: 35797 - RNA, 20 nt, Artificial Sequence
  GATA2 Guide RNA
ccgcaggaaucgagcugcug

SEQ ID NO: 35798 - RNA, 20 nt, Artificial Sequence
  GATA2 Guide RNA
ccggauguaggauccgcagg

SEQ ID NO: 35799 - RNA, 20 nt, Artificial Sequence
  GATA2 Guide RNA
ccgggaagcaagcagacggg

SEQ ID NO: 35800 - RNA, 20 nt, Artificial Sequence
  GATA2 Guide RNA
ccgucugcuugcuucccgga

SEQ ID NO: 35801 - RNA, 20 nt, Artificial Sequence
  GATA2 Guide RNA
ccguggugaugagaacccag

SEQ ID NO: 35802 - RNA, 20 nt, Artificial Sequence
  GATA2 Guide RNA
ccuacauccgggaagcaagc

SEQ ID NO: 35803 - RNA, 20 nt, Artificial Sequence
  GATA2 Guide RNA
ccuccccucccucgccuggc

SEQ ID NO: 35804 - RNA, 20 nt, Artificial Sequence
  GATA2 Guide RNA
ccuccuccccucccucgccu

SEQ ID NO: 35805 - RNA, 20 nt, Artificial Sequence
  GATA2 Guide RNA
ccugcggauccuacauccgg

SEQ ID NO: 35806 - RNA, 20 nt, Artificial Sequence
  GATA2 Guide RNA
ccuggguucucaucaccacg

SEQ ID NO: 35807 - RNA, 20 nt, Artificial Sequence
  GATA2 Guide RNA
cgagggaggggaggagggcc

SEQ ID NO: 35808 - RNA, 20 nt, Artificial Sequence
  GATA2 Guide RNA
cgauuccugcggauccuaca

SEQ ID NO: 35809 - RNA, 20 nt, Artificial Sequence
  GATA2 Guide RNA
cgcaggaaucgagcugcuga

SEQ ID NO: 35810 - RNA, 20 nt, Artificial Sequence
  GATA2 Guide RNA
cgccaggcgagggaggggag

SEQ ID NO: 35811 - RNA, 20 nt, Artificial Sequence
  GATA2 Guide RNA
cgccuggguucucaucacca

SEQ ID NO: 35812 - RNA, 20 nt, Artificial Sequence
  GATA2 Guide RNA
cgcgcggcgccuggguucuc

SEQ ID NO: 35813 - RNA, 20 nt, Artificial Sequence
  GATA2 Guide RNA
cgcggcgccuggguucucau

SEQ ID NO: 35814 - RNA, 20 nt, Artificial Sequence
  GATA2 Guide RNA
cggauccuacauccgggaag

SEQ ID NO: 35815 - RNA, 20 nt, Artificial Sequence
  GATA2 Guide RNA
cggauguaggauccgcagga

SEQ ID NO: 35816 - RNA, 20 nt, Artificial Sequence
  GATA2 Guide RNA
cggccgcugcucccaccucu

SEQ ID NO: 35817 - RNA, 20 nt, Artificial Sequence
  GATA2 Guide RNA
cggcgccuggguucucauca

SEQ ID NO: 35818 - RNA, 20 nt, Artificial Sequence
  GATA2 Guide RNA
cgggaagcaagcagacgggc

SEQ ID NO: 35819 - RNA, 20 nt, Artificial Sequence
  GATA2 Guide RNA
cgggagaggugggagcagcg

SEQ ID NO: 35820 - RNA, 20 nt, Artificial Sequence
  GATA2 Guide RNA
cgggcccuccuccccucccu

SEQ ID NO: 35821 - RNA, 20 nt, Artificial Sequence
  GATA2 Guide RNA
cgucugcuugcuucccggau

SEQ ID NO: 35822 - RNA, 20 nt, Artificial Sequence
  GATA2 Guide RNA
cguggugaugagaacccagg

SEQ ID NO: 35823 - RNA, 20 nt, Artificial Sequence
  GATA2 Guide RNA
cuacauccgggaagcaagca

SEQ ID NO: 35824 - RNA, 20 nt, Artificial Sequence
  GATA2 Guide RNA
cucaucaccacgggcccagu

SEQ ID NO: 35825 - RNA, 20 nt, Artificial Sequence
  GATA2 Guide RNA
cuccccucccucgccuggcg

SEQ ID NO: 35826 - RNA, 20 nt, Artificial Sequence
  GATA2 Guide RNA
cuccuccccucccucgccug

SEQ ID NO: 35827 - RNA, 20 nt, Artificial Sequence
  GATA2 Guide RNA
cucgauuccugcggauccua

SEQ ID NO: 35828 - RNA, 20 nt, Artificial Sequence
  GATA2 Guide RNA
cugcggauccuacauccggg

SEQ ID NO: 35829 - RNA, 20 nt, Artificial Sequence
  GATA2 Guide RNA
cugcuugcuucccggaugua

SEQ ID NO: 35830 - RNA, 20 nt, Artificial Sequence
  GATA2 Guide RNA
cugggcccguggugaugaga

SEQ ID NO: 35831 - RNA, 20 nt, Artificial Sequence
  GATA2 Guide RNA
cuggguucucaucaccacgg

SEQ ID NO: 35832 - RNA, 20 nt, Artificial Sequence
  GATA2 Guide RNA
cuucccggauguaggauccg

SEQ ID NO: 35833 - RNA, 20 nt, Artificial Sequence
  GATA2 Guide RNA
cuugcuucccggauguagga

SEQ ID NO: 35834 - RNA, 20 nt, Artificial Sequence
  GATA2 Guide RNA
gaagcaagcagacgggcccu

SEQ ID NO: 35835 - RNA, 20 nt, Artificial Sequence
  GATA2 Guide RNA
gaaucgagcugcugaaaaau

SEQ ID NO: 35836 - RNA, 20 nt, Artificial Sequence
  GATA2 Guide RNA
gacgggcccuccuccccucc

SEQ ID NO: 35837 - RNA, 20 nt, Artificial Sequence
  GATA2 Guide RNA
gagaacccaggcgccgcgcg

SEQ ID NO: 35838 - RNA, 20 nt, Artificial Sequence
  GATA2 Guide RNA
gagcacugggcccgugguga

SEQ ID NO: 35839 - RNA, 20 nt, Artificial Sequence
  GATA2 Guide RNA
gaggagggcccgucugcuug

SEQ ID NO: 35840 - RNA, 20 nt, Artificial Sequence
  GATA2 Guide RNA
gagggaggggaggagggccc

SEQ ID NO: 35841 - RNA, 20 nt, Artificial Sequence
  GATA2 Guide RNA
gagggcccgucugcuugcuu

SEQ ID NO: 35842 - RNA, 20 nt, Artificial Sequence
  GATA2 Guide RNA
gaggggaggagggcccgucu

SEQ ID NO: 35843 - RNA, 20 nt, Artificial Sequence
  GATA2 Guide RNA
gauccgcaggaaucgagcug

SEQ ID NO: 35844 - RNA, 20 nt, Artificial Sequence
  GATA2 Guide RNA
gauccuacauccgggaagca

SEQ ID NO: 35845 - RNA, 20 nt, Artificial Sequence
  GATA2 Guide RNA
gaugagaacccaggcgccgc

SEQ ID NO: 35846 - RNA, 20 nt, Artificial Sequence
  GATA2 Guide RNA
gauguaggauccgcaggaau

SEQ ID NO: 35847 - RNA, 20 nt, Artificial Sequence
  GATA2 Guide RNA
gauuccugcggauccuacau

SEQ ID NO: 35848 - RNA, 20 nt, Artificial Sequence
  GATA2 Guide RNA
gcaagcagacgggcccuccu

SEQ ID NO: 35849 - RNA, 20 nt, Artificial Sequence
  GATA2 Guide RNA
gcacugggcccguggugaug

SEQ ID NO: 35850 - RNA, 20 nt, Artificial Sequence
  GATA2 Guide RNA
gcagacgggcccuccucccc

SEQ ID NO: 35851 - RNA, 20 nt, Artificial Sequence
  GATA2 Guide RNA
gcagcucgauuccugcggau

SEQ ID NO: 35852 - RNA, 20 nt, Artificial Sequence
  GATA2 Guide RNA
gcaggaaucgagcugcugaa

SEQ ID NO: 35853 - RNA, 20 nt, Artificial Sequence
  GATA2 Guide RNA
gccaggcgagggaggggagg

SEQ ID NO: 35854 - RNA, 20 nt, Artificial Sequence
  GATA2 Guide RNA
gcccgucugcuugcuucccg

SEQ ID NO: 35855 - RNA, 20 nt, Artificial Sequence
  GATA2 Guide RNA
gcccguggugaugagaaccc

SEQ ID NO: 35856 - RNA, 20 nt, Artificial Sequence
  GATA2 Guide RNA
gcccuccuccccucccucgc

SEQ ID NO: 35857 - RNA, 20 nt, Artificial Sequence
  GATA2 Guide RNA
gccuggguucucaucaccac

SEQ ID NO: 35858 - RNA, 20 nt, Artificial Sequence
  GATA2 Guide RNA
gcgagggaggggaggagggc

SEQ ID NO: 35859 - RNA, 20 nt, Artificial Sequence
  GATA2 Guide RNA
gcgccaggcgagggagggga

SEQ ID NO: 35860 - RNA, 20 nt, Artificial Sequence
  GATA2 Guide RNA
gcgccuggguucucaucacc

SEQ ID NO: 35861 - RNA, 20 nt, Artificial Sequence
  GATA2 Guide RNA
gcgcgcggcgccuggguucu

SEQ ID NO: 35862 - RNA, 20 nt, Artificial Sequence
  GATA2 Guide RNA
gcgcggcgccuggguucuca

SEQ ID NO: 35863 - RNA, 20 nt, Artificial Sequence
  GATA2 Guide RNA
gcggauccuacauccgggaa

SEQ ID NO: 35864 - RNA, 20 nt, Artificial Sequence
  GATA2 Guide RNA
gcggcgccuggguucucauc

SEQ ID NO: 35865 - RNA, 20 nt, Artificial Sequence
  GATA2 Guide RNA
gcucgauuccugcggauccu

SEQ ID NO: 35866 - RNA, 20 nt, Artificial Sequence
  GATA2 Guide RNA
gcuucccggauguaggaucc

SEQ ID NO: 35867 - RNA, 20 nt, Artificial Sequence
  GATA2 Guide RNA
gcuugcuucccggauguagg

SEQ ID NO: 35868 - RNA, 20 nt, Artificial Sequence
  GATA2 Guide RNA
ggaagcaagcagacgggccc

SEQ ID NO: 35869 - RNA, 20 nt, Artificial Sequence
  GATA2 Guide RNA
ggaaucgagcugcugaaaaa

SEQ ID NO: 35870 - RNA, 20 nt, Artificial Sequence
  GATA2 Guide RNA
ggaggagggcccgucugcuu

SEQ ID NO: 35871 - RNA, 20 nt, Artificial Sequence
  GATA2 Guide RNA
ggagggcccgucugcuugcu

SEQ ID NO: 35872 - RNA, 20 nt, Artificial Sequence
  GATA2 Guide RNA
ggaggggaggagggcccguc

SEQ ID NO: 35873 - RNA, 20 nt, Artificial Sequence
  GATA2 Guide RNA
ggauccgcaggaaucgagcu

SEQ ID NO: 35874 - RNA, 20 nt, Artificial Sequence
  GATA2 Guide RNA
ggauccuacauccgggaagc

SEQ ID NO: 35875 - RNA, 20 nt, Artificial Sequence
  GATA2 Guide RNA
ggauguaggauccgcaggaa

SEQ ID NO: 35876 - RNA, 20 nt, Artificial Sequence
  GATA2 Guide RNA
ggcccgucugcuugcuuccc

SEQ ID NO: 35877 - RNA, 20 nt, Artificial Sequence
  GATA2 Guide RNA
ggcccguggugaugagaacc

SEQ ID NO: 35878 - RNA, 20 nt, Artificial Sequence
  GATA2 Guide RNA
ggcccuccuccccucccucg

SEQ ID NO: 35879 - RNA, 20 nt, Artificial Sequence
  GATA2 Guide RNA
ggcgagggaggggaggaggg

SEQ ID NO: 35880 - RNA, 20 nt, Artificial Sequence
  GATA2 Guide RNA
ggcgccuggguucucaucac

SEQ ID NO: 35881 - RNA, 20 nt, Artificial Sequence
  GATA2 Guide RNA
gggaagcaagcagacgggcc

SEQ ID NO: 35882 - RNA, 20 nt, Artificial Sequence
  GATA2 Guide RNA
gggaggagggcccgucugcu

SEQ ID NO: 35883 - RNA, 20 nt, Artificial Sequence
  GATA2 Guide RNA
gggaggggaggagggcccgu

SEQ ID NO: 35884 - RNA, 20 nt, Artificial Sequence
  GATA2 Guide RNA
gggcccgucugcuugcuucc

SEQ ID NO: 35885 - RNA, 20 nt, Artificial Sequence
  GATA2 Guide RNA
gggcccguggugaugagaac

SEQ ID NO: 35886 - RNA, 20 nt, Artificial Sequence
  GATA2 Guide RNA
gggcccuccuccccucccuc

SEQ ID NO: 35887 - RNA, 20 nt, Artificial Sequence
  GATA2 Guide RNA
ggggaggagggcccgucugc

SEQ ID NO: 35888 - RNA, 20 nt, Artificial Sequence
  GATA2 Guide RNA
ggguucucaucaccacgggc

SEQ ID NO: 35889 - RNA, 20 nt, Artificial Sequence
  GATA2 Guide RNA
ggugaugagaacccaggcgc

SEQ ID NO: 35890 - RNA, 20 nt, Artificial Sequence
  GATA2 Guide RNA
gguucucaucaccacgggcc

SEQ ID NO: 35891 - RNA, 20 nt, Artificial Sequence
  GATA2 Guide RNA
guaggauccgcaggaaucga

SEQ ID NO: 35892 - RNA, 20 nt, Artificial Sequence
  GATA2 Guide RNA
gucugcuugcuucccggaug

SEQ ID NO: 35893 - RNA, 20 nt, Artificial Sequence
  GATA2 Guide RNA
gugaugagaacccaggcgcc

SEQ ID NO: 35894 - RNA, 20 nt, Artificial Sequence
  GATA2 Guide RNA
guggugaugagaacccaggc

SEQ ID NO: 35895 - RNA, 20 nt, Artificial Sequence
  GATA2 Guide RNA
guucucaucaccacgggccc

SEQ ID NO: 35896 - RNA, 20 nt, Artificial Sequence
  GATA2 Guide RNA
uacauccgggaagcaagcag

SEQ ID NO: 35897 - RNA, 20 nt, Artificial Sequence
  GATA2 Guide RNA
uaggauccgcaggaaucgag

SEQ ID NO: 35898 - RNA, 20 nt, Artificial Sequence
  GATA2 Guide RNA
ucagcagcucgauuccugcg

SEQ ID NO: 35899 - RNA, 20 nt, Artificial Sequence
  GATA2 Guide RNA
uccccucccucgccuggcgc

SEQ ID NO: 35900 - RNA, 20 nt, Artificial Sequence
  GATA2 Guide RNA
ucccggauguaggauccgca

SEQ ID NO: 35901 - RNA, 20 nt, Artificial Sequence
  GATA2 Guide RNA
uccgcaggaaucgagcugcu

SEQ ID NO: 35902 - RNA, 20 nt, Artificial Sequence
  GATA2 Guide RNA
uccgggaagcaagcagacgg

SEQ ID NO: 35903 - RNA, 20 nt, Artificial Sequence
  GATA2 Guide RNA
uccuacauccgggaagcaag

SEQ ID NO: 35904 - RNA, 20 nt, Artificial Sequence
  GATA2 Guide RNA
uccuccccucccucgccugg

SEQ ID NO: 35905 - RNA, 20 nt, Artificial Sequence
  GATA2 Guide RNA
uccugcggauccuacauccg

SEQ ID NO: 35906 - RNA, 20 nt, Artificial Sequence
  GATA2 Guide RNA
ucgauuccugcggauccuac

SEQ ID NO: 35907 - RNA, 20 nt, Artificial Sequence
  GATA2 Guide RNA
ucucaucaccacgggcccag

SEQ ID NO: 35908 - RNA, 20 nt, Artificial Sequence
  GATA2 Guide RNA
ucugcuugcuucccggaugu

SEQ ID NO: 35909 - RNA, 20 nt, Artificial Sequence
  GATA2 Guide RNA
ugagaacccaggcgccgcgc

SEQ ID NO: 35910 - RNA, 20 nt, Artificial Sequence
  GATA2 Guide RNA
ugaugagaacccaggcgccg

SEQ ID NO: 35911 - RNA, 20 nt, Artificial Sequence
  GATA2 Guide RNA
ugcggauccuacauccggga

SEQ ID NO: 35912 - RNA, 20 nt, Artificial Sequence
  GATA2 Guide RNA
ugcuucccggauguaggauc

SEQ ID NO: 35913 - RNA, 20 nt, Artificial Sequence
  GATA2 Guide RNA
ugcuugcuucccggauguag

SEQ ID NO: 35914 - RNA, 20 nt, Artificial Sequence
  GATA2 Guide RNA
uggcgcgcggcgccuggguu

SEQ ID NO: 35915 - RNA, 20 nt, Artificial Sequence
  GATA2 Guide RNA
ugggcccguggugaugagaa

SEQ ID NO: 35916 - RNA, 20 nt, Artificial Sequence
  GATA2 Guide RNA
uggguucucaucaccacggg

SEQ ID NO: 35917 - RNA, 20 nt, Artificial Sequence
  GATA2 Guide RNA
uggugaugagaacccaggcg

SEQ ID NO: 35918 - RNA, 20 nt, Artificial Sequence
  GATA2 Guide RNA
uguaggauccgcaggaaucg

SEQ ID NO: 35919 - RNA, 20 nt, Artificial Sequence
  GATA2 Guide RNA
uucagcagcucgauuccugc

SEQ ID NO: 35920 - RNA, 20 nt, Artificial Sequence
  GATA2 Guide RNA
uucccggauguaggauccgc

SEQ ID NO: 35921 - RNA, 20 nt, Artificial Sequence
  GATA2 Guide RNA
uuccugcggauccuacaucc

SEQ ID NO: 35922 - RNA, 20 nt, Artificial Sequence
  GATA2 Guide RNA
uucucaucaccacgggccca

SEQ ID NO: 35923 - RNA, 20 nt, Artificial Sequence
  GATA2 Guide RNA
uugcuucccggauguaggau

SEQ ID NO: 35924 - RNA, 20 nt, Artificial Sequence
  GATA2 Guide RNA
uuucagcagcucgauuccug

SEQ ID NO: 35925 - RNA, 20 nt, Artificial Sequence
  GATA2 Guide RNA
uuuucagcagcucgauuccu

SEQ ID NO: 35926 - RNA, 20 nt, Artificial Sequence
  GATA2 Guide RNA
uuuuucagcagcucgauucc

SEQ ID NO: 35927 - RNA, 21 nt, Artificial Sequence
  GATA2 Guide RNA
aagcaagcagacgggcccucc

SEQ ID NO: 35928 - RNA, 21 nt, Artificial Sequence
  GATA2 Guide RNA
aagcagacgggcccuccuccc

SEQ ID NO: 35929 - RNA, 21 nt, Artificial Sequence
  GATA2 Guide RNA
aauuuuucagcagcucgauuc

SEQ ID NO: 35930 - RNA, 21 nt, Artificial Sequence
  GATA2 Guide RNA
acauccgggaagcaagcagac

SEQ ID NO: 35931 - RNA, 21 nt, Artificial Sequence
  GATA2 Guide RNA
acgggcccuccuccccucccu

SEQ ID NO: 35932 - RNA, 21 nt, Artificial Sequence
  GATA2 Guide RNA
acugggcccguggugaugaga

SEQ ID NO: 35933 - RNA, 21 nt, Artificial Sequence
  GATA2 Guide RNA
agacgggcccuccuccccucc

SEQ ID NO: 35934 - RNA, 21 nt, Artificial Sequence
  GATA2 Guide RNA
agcaagcagacgggcccuccu

SEQ ID NO: 35935 - RNA, 21 nt, Artificial Sequence
  GATA2 Guide RNA
agcacugggcccguggugaug

SEQ ID NO: 35936 - RNA, 21 nt, Artificial Sequence
  GATA2 Guide RNA
agcagacgggcccuccucccc

SEQ ID NO: 35937 - RNA, 21 nt, Artificial Sequence
  GATA2 Guide RNA
agcagcucgauuccugcggau

SEQ ID NO: 35938 - RNA, 21 nt, Artificial Sequence
  GATA2 Guide RNA
agcucgauuccugcggauccu

SEQ ID NO: 35939 - RNA, 21 nt, Artificial Sequence
  GATA2 Guide RNA
aggaaucgagcugcugaaaaa

SEQ ID NO: 35940 - RNA, 21 nt, Artificial Sequence
  GATA2 Guide RNA
aggagggcccgucugcuugcu

SEQ ID NO: 35941 - RNA, 21 nt, Artificial Sequence
  GATA2 Guide RNA
aggauccgcaggaaucgagcu

SEQ ID NO: 35942 - RNA, 21 nt, Artificial Sequence
  GATA2 Guide RNA
aggcgagggaggggaggaggg

SEQ ID NO: 35943 - RNA, 21 nt, Artificial Sequence
  GATA2 Guide RNA
agggaggggaggagggcccgu

SEQ ID NO: 35944 - RNA, 21 nt, Artificial Sequence
  GATA2 Guide RNA
agggcccgucugcuugcuucc

SEQ ID NO: 35945 - RNA, 21 nt, Artificial Sequence
  GATA2 Guide RNA
aggggaggagggcccgucugc

SEQ ID NO: 35946 - RNA, 21 nt, Artificial Sequence
  GATA2 Guide RNA
auccgcaggaaucgagcugcu

SEQ ID NO: 35947 - RNA, 21 nt, Artificial Sequence
  GATA2 Guide RNA
auccgggaagcaagcagacgg

SEQ ID NO: 35948 - RNA, 21 nt, Artificial Sequence
  GATA2 Guide RNA
auccuacauccgggaagcaag

SEQ ID NO: 35949 - RNA, 21 nt, Artificial Sequence
  GATA2 Guide RNA
augagaacccaggcgccgcgc

SEQ ID NO: 35950 - RNA, 21 nt, Artificial Sequence
  GATA2 Guide RNA
auguaggauccgcaggaaucg

SEQ ID NO: 35951 - RNA, 21 nt, Artificial Sequence
  GATA2 Guide RNA
auuccugcggauccuacaucc

SEQ ID NO: 35952 - RNA, 21 nt, Artificial Sequence
  GATA2 Guide RNA
auuuuucagcagcucgauucc

SEQ ID NO: 35953 - RNA, 21 nt, Artificial Sequence
  GATA2 Guide RNA
caagcagacgggcccuccucc

SEQ ID NO: 35954 - RNA, 21 nt, Artificial Sequence
  GATA2 Guide RNA
caauuuuucagcagcucgauu

SEQ ID NO: 35955 - RNA, 21 nt, Artificial Sequence
  GATA2 Guide RNA
cacugggcccguggugaugag

SEQ ID NO: 35956 - RNA, 21 nt, Artificial Sequence
  GATA2 Guide RNA
cagacgggcccuccuccccuc

SEQ ID NO: 35957 - RNA, 21 nt, Artificial Sequence
  GATA2 Guide RNA
cagcagcucgauuccugcgga

SEQ ID NO: 35958 - RNA, 21 nt, Artificial Sequence
  GATA2 Guide RNA
cagcucgauuccugcggaucc

SEQ ID NO: 35959 - RNA, 21 nt, Artificial Sequence
  GATA2 Guide RNA
caggaaucgagcugcugaaaa

SEQ ID NO: 35960 - RNA, 21 nt, Artificial Sequence
  GATA2 Guide RNA
caggcgagggaggggaggagg

SEQ ID NO: 35961 - RNA, 21 nt, Artificial Sequence
  GATA2 Guide RNA
cauccgggaagcaagcagacg

SEQ ID NO: 35962 - RNA, 21 nt, Artificial Sequence
  GATA2 Guide RNA
ccaauuuuucagcagcucgau

SEQ ID NO: 35963 - RNA, 21 nt, Artificial Sequence
  GATA2 Guide RNA
ccaggcgagggaggggaggag

SEQ ID NO: 35964 - RNA, 21 nt, Artificial Sequence
  GATA2 Guide RNA
cccaauuuuucagcagcucga

SEQ ID NO: 35965 - RNA, 21 nt, Artificial Sequence
  GATA2 Guide RNA
ccccaauuuuucagcagcucg

SEQ ID NO: 35966 - RNA, 21 nt, Artificial Sequence
  GATA2 Guide RNA
cccggauguaggauccgcagg

SEQ ID NO: 35967 - RNA, 21 nt, Artificial Sequence
  GATA2 Guide RNA
cccgucugcuugcuucccgga

SEQ ID NO: 35968 - RNA, 21 nt, Artificial Sequence
  GATA2 Guide RNA
cccguggugaugagaacccag

SEQ ID NO: 35969 - RNA, 21 nt, Artificial Sequence
  GATA2 Guide RNA
cccuccuccccucccucgccu

SEQ ID NO: 35970 - RNA, 21 nt, Artificial Sequence
  GATA2 Guide RNA
ccgcaggaaucgagcugcuga

SEQ ID NO: 35971 - RNA, 21 nt, Artificial Sequence
  GATA2 Guide RNA
ccggauguaggauccgcagga

SEQ ID NO: 35972 - RNA, 21 nt, Artificial Sequence
  GATA2 Guide RNA
ccgggaagcaagcagacgggc

SEQ ID NO: 35973 - RNA, 21 nt, Artificial Sequence
  GATA2 Guide RNA
ccgucugcuugcuucccggau

SEQ ID NO: 35974 - RNA, 21 nt, Artificial Sequence
  GATA2 Guide RNA
ccguggugaugagaacccagg

SEQ ID NO: 35975 - RNA, 21 nt, Artificial Sequence
  GATA2 Guide RNA
ccuacauccgggaagcaagca

SEQ ID NO: 35976 - RNA, 21 nt, Artificial Sequence
  GATA2 Guide RNA
ccuccuccccucccucgccug

SEQ ID NO: 35977 - RNA, 21 nt, Artificial Sequence
  GATA2 Guide RNA
ccugcggauccuacauccggg

SEQ ID NO: 35978 - RNA, 21 nt, Artificial Sequence
  GATA2 Guide RNA
ccuggguucucaucaccacgg

SEQ ID NO: 35979 - RNA, 21 nt, Artificial Sequence
  GATA2 Guide RNA
cgauuccugcggauccuacau

SEQ ID NO: 35980 - RNA, 21 nt, Artificial Sequence
  GATA2 Guide RNA
cgcaggaaucgagcugcugaa

SEQ ID NO: 35981 - RNA, 21 nt, Artificial Sequence
  GATA2 Guide RNA
cgccuggguucucaucaccac

SEQ ID NO: 35982 - RNA, 21 nt, Artificial Sequence
  GATA2 Guide RNA
cgcgcggcgccuggguucuca

SEQ ID NO: 35983 - RNA, 21 nt, Artificial Sequence
  GATA2 Guide RNA
cgcggcgccuggguucucauc

SEQ ID NO: 35984 - RNA, 21 nt, Artificial Sequence
  GATA2 Guide RNA
cggauccuacauccgggaagc

SEQ ID NO: 35985 - RNA, 21 nt, Artificial Sequence
  GATA2 Guide RNA
cggauguaggauccgcaggaa

SEQ ID NO: 35986 - RNA, 21 nt, Artificial Sequence
  GATA2 Guide RNA
cggcgccuggguucucaucac

SEQ ID NO: 35987 - RNA, 21 nt, Artificial Sequence
  GATA2 Guide RNA
cgggaagcaagcagacgggcc

SEQ ID NO: 35988 - RNA, 21 nt, Artificial Sequence
  GATA2 Guide RNA
cgggagaggugggagcagcgg

SEQ ID NO: 35989 - RNA, 21 nt, Artificial Sequence
  GATA2 Guide RNA
cgucugcuugcuucccggaug

SEQ ID NO: 35990 - RNA, 21 nt, Artificial Sequence
  GATA2 Guide RNA
cguggugaugagaacccaggc

SEQ ID NO: 35991 - RNA, 21 nt, Artificial Sequence
  GATA2 Guide RNA
cuacauccgggaagcaagcag

SEQ ID NO: 35992 - RNA, 21 nt, Artificial Sequence
  GATA2 Guide RNA
cuccuccccucccucgccugg

SEQ ID NO: 35993 - RNA, 21 nt, Artificial Sequence
  GATA2 Guide RNA
cucgauuccugcggauccuac

SEQ ID NO: 35994 - RNA, 21 nt, Artificial Sequence
  GATA2 Guide RNA
cugcggauccuacauccggga

SEQ ID NO: 35995 - RNA, 21 nt, Artificial Sequence
  GATA2 Guide RNA
cugcuugcuucccggauguag

SEQ ID NO: 35996 - RNA, 21 nt, Artificial Sequence
  GATA2 Guide RNA
cugggcccguggugaugagaa

SEQ ID NO: 35997 - RNA, 21 nt, Artificial Sequence
  GATA2 Guide RNA
cuggguucucaucaccacggg

SEQ ID NO: 35998 - RNA, 21 nt, Artificial Sequence
  GATA2 Guide RNA
cuucccggauguaggauccgc

SEQ ID NO: 35999 - RNA, 21 nt, Artificial Sequence
  GATA2 Guide RNA
cuugcuucccggauguaggau

SEQ ID NO: 36000 - RNA, 21 nt, Artificial Sequence
  GATA2 Guide RNA
gaagcaagcagacgggcccuc

SEQ ID NO: 36001 - RNA, 21 nt, Artificial Sequence
  GATA2 Guide RNA
gaaucgagcugcugaaaaauu

SEQ ID NO: 36002 - RNA, 21 nt, Artificial Sequence
  GATA2 Guide RNA
gagcacugggcccguggugau

SEQ ID NO: 36003 - RNA, 21 nt, Artificial Sequence
  GATA2 Guide RNA
gaggagggcccgucugcuugc

SEQ ID NO: 36004 - RNA, 21 nt, Artificial Sequence
  GATA2 Guide RNA
gagggcccgucugcuugcuuc

SEQ ID NO: 36005 - RNA, 21 nt, Artificial Sequence
  GATA2 Guide RNA
gaggggaggagggcccgucug

SEQ ID NO: 36006 - RNA, 21 nt, Artificial Sequence
  GATA2 Guide RNA
gauccgcaggaaucgagcugc

SEQ ID NO: 36007 - RNA, 21 nt, Artificial Sequence
  GATA2 Guide RNA
gauccuacauccgggaagcaa

SEQ ID NO: 36008 - RNA, 21 nt, Artificial Sequence
  GATA2 Guide RNA
gaugagaacccaggcgccgcg

SEQ ID NO: 36009 - RNA, 21 nt, Artificial Sequence
  GATA2 Guide RNA
gauguaggauccgcaggaauc

SEQ ID NO: 36010 - RNA, 21 nt, Artificial Sequence
  GATA2 Guide RNA
gauuccugcggauccuacauc

SEQ ID NO: 36011 - RNA, 21 nt, Artificial Sequence
  GATA2 Guide RNA
gcaagcagacgggcccuccuc

SEQ ID NO: 36012 - RNA, 21 nt, Artificial Sequence
  GATA2 Guide RNA
gcacugggcccguggugauga

SEQ ID NO: 36013 - RNA, 21 nt, Artificial Sequence
  GATA2 Guide RNA
gcagacgggcccuccuccccu

SEQ ID NO: 36014 - RNA, 21 nt, Artificial Sequence
  GATA2 Guide RNA
gcagcucgauuccugcggauc

SEQ ID NO: 36015 - RNA, 21 nt, Artificial Sequence
  GATA2 Guide RNA
gcaggaaucgagcugcugaaa

SEQ ID NO: 36016 - RNA, 21 nt, Artificial Sequence
  GATA2 Guide RNA
gccaggcgagggaggggagga

SEQ ID NO: 36017 - RNA, 21 nt, Artificial Sequence
  GATA2 Guide RNA
gcccgucugcuugcuucccgg

SEQ ID NO: 36018 - RNA, 21 nt, Artificial Sequence
  GATA2 Guide RNA
gcccguggugaugagaaccca

SEQ ID NO: 36019 - RNA, 21 nt, Artificial Sequence
  GATA2 Guide RNA
gccuggguucucaucaccacg

SEQ ID NO: 36020 - RNA, 21 nt, Artificial Sequence
  GATA2 Guide RNA
gcgccuggguucucaucacca

SEQ ID NO: 36021 - RNA, 21 nt, Artificial Sequence
  GATA2 Guide RNA
gcgcggcgccuggguucucau

SEQ ID NO: 36022 - RNA, 21 nt, Artificial Sequence
  GATA2 Guide RNA
gcggauccuacauccgggaag

SEQ ID NO: 36023 - RNA, 21 nt, Artificial Sequence
  GATA2 Guide RNA
gcggcgccuggguucucauca

SEQ ID NO: 36024 - RNA, 21 nt, Artificial Sequence
  GATA2 Guide RNA
gcucgauuccugcggauccua

SEQ ID NO: 36025 - RNA, 21 nt, Artificial Sequence
  GATA2 Guide RNA
gcuucccggauguaggauccg

SEQ ID NO: 36026 - RNA, 21 nt, Artificial Sequence
  GATA2 Guide RNA
gcuugcuucccggauguagga

SEQ ID NO: 36027 - RNA, 21 nt, Artificial Sequence
  GATA2 Guide RNA
ggaagcaagcagacgggcccu

SEQ ID NO: 36028 - RNA, 21 nt, Artificial Sequence
  GATA2 Guide RNA
ggaaucgagcugcugaaaaau

SEQ ID NO: 36029 - RNA, 21 nt, Artificial Sequence
  GATA2 Guide RNA
ggaggagggcccgucugcuug

SEQ ID NO: 36030 - RNA, 21 nt, Artificial Sequence
  GATA2 Guide RNA
ggagggcccgucugcuugcuu

SEQ ID NO: 36031 - RNA, 21 nt, Artificial Sequence
  GATA2 Guide RNA
ggaggggaggagggcccgucu

SEQ ID NO: 36032 - RNA, 21 nt, Artificial Sequence
  GATA2 Guide RNA
ggauccgcaggaaucgagcug

SEQ ID NO: 36033 - RNA, 21 nt, Artificial Sequence
  GATA2 Guide RNA
ggauccuacauccgggaagca

SEQ ID NO: 36034 - RNA, 21 nt, Artificial Sequence
  GATA2 Guide RNA
ggauguaggauccgcaggaau

SEQ ID NO: 36035 - RNA, 21 nt, Artificial Sequence
  GATA2 Guide RNA
ggcccgucugcuugcuucccg

SEQ ID NO: 36036 - RNA, 21 nt, Artificial Sequence
  GATA2 Guide RNA
ggcccguggugaugagaaccc

SEQ ID NO: 36037 - RNA, 21 nt, Artificial Sequence
  GATA2 Guide RNA
ggcgccuggguucucaucacc

SEQ ID NO: 36038 - RNA, 21 nt, Artificial Sequence
  GATA2 Guide RNA
gggaagcaagcagacgggccc

SEQ ID NO: 36039 - RNA, 21 nt, Artificial Sequence
  GATA2 Guide RNA
gggaggagggcccgucugcuu

SEQ ID NO: 36040 - RNA, 21 nt, Artificial Sequence
  GATA2 Guide RNA
gggcccgucugcuugcuuccc

SEQ ID NO: 36041 - RNA, 21 nt, Artificial Sequence
  GATA2 Guide RNA
gggcccguggugaugagaacc

SEQ ID NO: 36042 - RNA, 21 nt, Artificial Sequence
  GATA2 Guide RNA
ggggaggagggcccgucugcu

SEQ ID NO: 36043 - RNA, 21 nt, Artificial Sequence
  GATA2 Guide RNA
ggguucucaucaccacgggcc

SEQ ID NO: 36044 - RNA, 21 nt, Artificial Sequence
  GATA2 Guide RNA
ggugaugagaacccaggcgcc

SEQ ID NO: 36045 - RNA, 21 nt, Artificial Sequence
  GATA2 Guide RNA
gguucucaucaccacgggccc

SEQ ID NO: 36046 - RNA, 21 nt, Artificial Sequence
  GATA2 Guide RNA
guaggauccgcaggaaucgag

SEQ ID NO: 36047 - RNA, 21 nt, Artificial Sequence
  GATA2 Guide RNA
gucugcuugcuucccggaugu

SEQ ID NO: 36048 - RNA, 21 nt, Artificial Sequence
  GATA2 Guide RNA
gugaugagaacccaggcgccg

SEQ ID NO: 36049 - RNA, 21 nt, Artificial Sequence
  GATA2 Guide RNA
guggugaugagaacccaggcg

SEQ ID NO: 36050 - RNA, 21 nt, Artificial Sequence
  GATA2 Guide RNA
guucucaucaccacgggccca

SEQ ID NO: 36051 - RNA, 21 nt, Artificial Sequence
  GATA2 Guide RNA
uacauccgggaagcaagcaga

SEQ ID NO: 36052 - RNA, 21 nt, Artificial Sequence
  GATA2 Guide RNA
uaggauccgcaggaaucgagc

SEQ ID NO: 36053 - RNA, 21 nt, Artificial Sequence
  GATA2 Guide RNA
ucagcagcucgauuccugcgg

SEQ ID NO: 36054 - RNA, 21 nt, Artificial Sequence
  GATA2 Guide RNA
ucccggauguaggauccgcag

SEQ ID NO: 36055 - RNA, 21 nt, Artificial Sequence
  GATA2 Guide RNA
uccgcaggaaucgagcugcug

SEQ ID NO: 36056 - RNA, 21 nt, Artificial Sequence
  GATA2 Guide RNA
uccgggaagcaagcagacggg

SEQ ID NO: 36057 - RNA, 21 nt, Artificial Sequence
  GATA2 Guide RNA
uccuacauccgggaagcaagc

SEQ ID NO: 36058 - RNA, 21 nt, Artificial Sequence
  GATA2 Guide RNA
uccuccccucccucgccuggc

SEQ ID NO: 36059 - RNA, 21 nt, Artificial Sequence
  GATA2 Guide RNA
uccugcggauccuacauccgg

SEQ ID NO: 36060 - RNA, 21 nt, Artificial Sequence
  GATA2 Guide RNA
ucgauuccugcggauccuaca

SEQ ID NO: 36061 - RNA, 21 nt, Artificial Sequence
  GATA2 Guide RNA
ucggccgcugcucccaccucu

SEQ ID NO: 36062 - RNA, 21 nt, Artificial Sequence
  GATA2 Guide RNA
ucucaucaccacgggcccagu

SEQ ID NO: 36063 - RNA, 21 nt, Artificial Sequence
  GATA2 Guide RNA
ucugcuugcuucccggaugua

SEQ ID NO: 36064 - RNA, 21 nt, Artificial Sequence
  GATA2 Guide RNA
ugagaacccaggcgccgcgcg

SEQ ID NO: 36065 - RNA, 21 nt, Artificial Sequence
  GATA2 Guide RNA
ugaugagaacccaggcgccgc

SEQ ID NO: 36066 - RNA, 21 nt, Artificial Sequence
  GATA2 Guide RNA
ugcggauccuacauccgggaa

SEQ ID NO: 36067 - RNA, 21 nt, Artificial Sequence
  GATA2 Guide RNA
ugcuucccggauguaggaucc

SEQ ID NO: 36068 - RNA, 21 nt, Artificial Sequence
  GATA2 Guide RNA
ugcuugcuucccggauguagg

SEQ ID NO: 36069 - RNA, 21 nt, Artificial Sequence
  GATA2 Guide RNA
ugggcccguggugaugagaac

SEQ ID NO: 36070 - RNA, 21 nt, Artificial Sequence
  GATA2 Guide RNA
uggguucucaucaccacgggc

SEQ ID NO: 36071 - RNA, 21 nt, Artificial Sequence
  GATA2 Guide RNA
uggugaugagaacccaggcgc

SEQ ID NO: 36072 - RNA, 21 nt, Artificial Sequence
  GATA2 Guide RNA
uguaggauccgcaggaaucga

SEQ ID NO: 36073 - RNA, 21 nt, Artificial Sequence
  GATA2 Guide RNA
uucagcagcucgauuccugcg

SEQ ID NO: 36074 - RNA, 21 nt, Artificial Sequence
  GATA2 Guide RNA
uucccggauguaggauccgca

SEQ ID NO: 36075 - RNA, 21 nt, Artificial Sequence
  GATA2 Guide RNA
uuccugcggauccuacauccg

SEQ ID NO: 36076 - RNA, 21 nt, Artificial Sequence
  GATA2 Guide RNA
uucucaucaccacgggcccag

SEQ ID NO: 36077 - RNA, 21 nt, Artificial Sequence
  GATA2 Guide RNA
uugcuucccggauguaggauc

SEQ ID NO: 36078 - RNA, 21 nt, Artificial Sequence
  GATA2 Guide RNA
uuucagcagcucgauuccugc

SEQ ID NO: 36079 - RNA, 21 nt, Artificial Sequence
  GATA2 Guide RNA
uuuucagcagcucgauuccug

SEQ ID NO: 36080 - RNA, 21 nt, Artificial Sequence
  GATA2 Guide RNA
uuuuucagcagcucgauuccu

SEQ ID NO: 36081 - RNA, 22 nt, Artificial Sequence
  GATA2 Guide RNA
aagcaagcagacgggcccuccu

SEQ ID NO: 36082 - RNA, 22 nt, Artificial Sequence
  GATA2 Guide RNA
aagcagacgggcccuccucccc

SEQ ID NO: 36083 - RNA, 22 nt, Artificial Sequence
  GATA2 Guide RNA
aauuuuucagcagcucgauucc

SEQ ID NO: 36084 - RNA, 22 nt, Artificial Sequence
  GATA2 Guide RNA
acauccgggaagcaagcagacg

SEQ ID NO: 36085 - RNA, 22 nt, Artificial Sequence
  GATA2 Guide RNA
acgggcccuccuccccucccuc

SEQ ID NO: 36086 - RNA, 22 nt, Artificial Sequence
  GATA2 Guide RNA
acugggcccguggugaugagaa

SEQ ID NO: 36087 - RNA, 22 nt, Artificial Sequence
  GATA2 Guide RNA
agaacccaggcgccgcgcgcca

SEQ ID NO: 36088 - RNA, 22 nt, Artificial Sequence
  GATA2 Guide RNA
agacgggcccuccuccccuccc

SEQ ID NO: 36089 - RNA, 22 nt, Artificial Sequence
  GATA2 Guide RNA
agcaagcagacgggcccuccuc

SEQ ID NO: 36090 - RNA, 22 nt, Artificial Sequence
  GATA2 Guide RNA
agcacugggcccguggugauga

SEQ ID NO: 36091 - RNA, 22 nt, Artificial Sequence
  GATA2 Guide RNA
agcagacgggcccuccuccccu

SEQ ID NO: 36092 - RNA, 22 nt, Artificial Sequence
  GATA2 Guide RNA
agcagcucgauuccugcggauc

SEQ ID NO: 36093 - RNA, 22 nt, Artificial Sequence
  GATA2 Guide RNA
agcucgauuccugcggauccua

SEQ ID NO: 36094 - RNA, 22 nt, Artificial Sequence
  GATA2 Guide RNA
aggaaucgagcugcugaaaaau

SEQ ID NO: 36095 - RNA, 22 nt, Artificial Sequence
  GATA2 Guide RNA
aggagggcccgucugcuugcuu

SEQ ID NO: 36096 - RNA, 22 nt, Artificial Sequence
  GATA2 Guide RNA
aggauccgcaggaaucgagcug

SEQ ID NO: 36097 - RNA, 22 nt, Artificial Sequence
  GATA2 Guide RNA
aggcgagggaggggaggagggc

SEQ ID NO: 36098 - RNA, 22 nt, Artificial Sequence
  GATA2 Guide RNA
agggaggggaggagggcccguc

SEQ ID NO: 36099 - RNA, 22 nt, Artificial Sequence
  GATA2 Guide RNA
agggcccgucugcuugcuuccc

SEQ ID NO: 36100 - RNA, 22 nt, Artificial Sequence
  GATA2 Guide RNA
aggggaggagggcccgucugcu

SEQ ID NO: 36101 - RNA, 22 nt, Artificial Sequence
  GATA2 Guide RNA
auccgcaggaaucgagcugcug

SEQ ID NO: 36102 - RNA, 22 nt, Artificial Sequence
  GATA2 Guide RNA
auccgggaagcaagcagacggg

SEQ ID NO: 36103 - RNA, 22 nt, Artificial Sequence
  GATA2 Guide RNA
auccuacauccgggaagcaagc

SEQ ID NO: 36104 - RNA, 22 nt, Artificial Sequence
  GATA2 Guide RNA
aucggccgcugcucccaccucu

SEQ ID NO: 36105 - RNA, 22 nt, Artificial Sequence
  GATA2 Guide RNA
augagaacccaggcgccgcgcg

SEQ ID NO: 36106 - RNA, 22 nt, Artificial Sequence
  GATA2 Guide RNA
auguaggauccgcaggaaucga

SEQ ID NO: 36107 - RNA, 22 nt, Artificial Sequence
  GATA2 Guide RNA
auuccugcggauccuacauccg

SEQ ID NO: 36108 - RNA, 22 nt, Artificial Sequence
  GATA2 Guide RNA
auuuuucagcagcucgauuccu

SEQ ID NO: 36109 - RNA, 22 nt, Artificial Sequence
  GATA2 Guide RNA
caagcagacgggcccuccuccc

SEQ ID NO: 36110 - RNA, 22 nt, Artificial Sequence
  GATA2 Guide RNA
caauuuuucagcagcucgauuc

SEQ ID NO: 36111 - RNA, 22 nt, Artificial Sequence
  GATA2 Guide RNA
cacugggcccguggugaugaga

SEQ ID NO: 36112 - RNA, 22 nt, Artificial Sequence
  GATA2 Guide RNA
cagacgggcccuccuccccucc

SEQ ID NO: 36113 - RNA, 22 nt, Artificial Sequence
  GATA2 Guide RNA
cagcagcucgauuccugcggau

SEQ ID NO: 36114 - RNA, 22 nt, Artificial Sequence
  GATA2 Guide RNA
cagcucgauuccugcggauccu

SEQ ID NO: 36115 - RNA, 22 nt, Artificial Sequence
  GATA2 Guide RNA
caggaaucgagcugcugaaaaa

SEQ ID NO: 36116 - RNA, 22 nt, Artificial Sequence
  GATA2 Guide RNA
caggcgagggaggggaggaggg

SEQ ID NO: 36117 - RNA, 22 nt, Artificial Sequence
  GATA2 Guide RNA
cauccgggaagcaagcagacgg

SEQ ID NO: 36118 - RNA, 22 nt, Artificial Sequence
  GATA2 Guide RNA
ccaauuuuucagcagcucgauu

SEQ ID NO: 36119 - RNA, 22 nt, Artificial Sequence
  GATA2 Guide RNA
ccaggcgagggaggggaggagg

SEQ ID NO: 36120 - RNA, 22 nt, Artificial Sequence
  GATA2 Guide RNA
cccaauuuuucagcagcucgau

SEQ ID NO: 36121 - RNA, 22 nt, Artificial Sequence
  GATA2 Guide RNA
ccccaauuuuucagcagcucga

SEQ ID NO: 36122 - RNA, 22 nt, Artificial Sequence
  GATA2 Guide RNA
cccggauguaggauccgcagga

SEQ ID NO: 36123 - RNA, 22 nt, Artificial Sequence
  GATA2 Guide RNA
cccgucugcuugcuucccggau

SEQ ID NO: 36124 - RNA, 22 nt, Artificial Sequence
  GATA2 Guide RNA
cccguggugaugagaacccagg

SEQ ID NO: 36125 - RNA, 22 nt, Artificial Sequence
  GATA2 Guide RNA
cccuccuccccucccucgccug

SEQ ID NO: 36126 - RNA, 22 nt, Artificial Sequence
  GATA2 Guide RNA
ccgcaggaaucgagcugcugaa

SEQ ID NO: 36127 - RNA, 22 nt, Artificial Sequence
  GATA2 Guide RNA
ccggauguaggauccgcaggaa

SEQ ID NO: 36128 - RNA, 22 nt, Artificial Sequence
  GATA2 Guide RNA
ccgggaagcaagcagacgggcc

SEQ ID NO: 36129 - RNA, 22 nt, Artificial Sequence
  GATA2 Guide RNA
ccgucugcuugcuucccggaug

SEQ ID NO: 36130 - RNA, 22 nt, Artificial Sequence
  GATA2 Guide RNA
ccguggugaugagaacccaggc

SEQ ID NO: 36131 - RNA, 22 nt, Artificial Sequence
  GATA2 Guide RNA
ccuacauccgggaagcaagcag

SEQ ID NO: 36132 - RNA, 22 nt, Artificial Sequence
  GATA2 Guide RNA
ccuccuccccucccucgccugg

SEQ ID NO: 36133 - RNA, 22 nt, Artificial Sequence
  GATA2 Guide RNA
ccugcggauccuacauccggga

SEQ ID NO: 36134 - RNA, 22 nt, Artificial Sequence
  GATA2 Guide RNA
ccuggguucucaucaccacggg

SEQ ID NO: 36135 - RNA, 22 nt, Artificial Sequence
  GATA2 Guide RNA
cgauuccugcggauccuacauc

SEQ ID NO: 36136 - RNA, 22 nt, Artificial Sequence
  GATA2 Guide RNA
cgcaggaaucgagcugcugaaa

SEQ ID NO: 36137 - RNA, 22 nt, Artificial Sequence
  GATA2 Guide RNA
cgccaggcgagggaggggagga

SEQ ID NO: 36138 - RNA, 22 nt, Artificial Sequence
  GATA2 Guide RNA
cgccuggguucucaucaccacg

SEQ ID NO: 36139 - RNA, 22 nt, Artificial Sequence
  GATA2 Guide RNA
cgcgcggcgccuggguucucau

SEQ ID NO: 36140 - RNA, 22 nt, Artificial Sequence
  GATA2 Guide RNA
cgcggcgccuggguucucauca

SEQ ID NO: 36141 - RNA, 22 nt, Artificial Sequence
  GATA2 Guide RNA
cggauccuacauccgggaagca

SEQ ID NO: 36142 - RNA, 22 nt, Artificial Sequence
  GATA2 Guide RNA
cggauguaggauccgcaggaau

SEQ ID NO: 36143 - RNA, 22 nt, Artificial Sequence
  GATA2 Guide RNA
cggcgccuggguucucaucacc

SEQ ID NO: 36144 - RNA, 22 nt, Artificial Sequence
  GATA2 Guide RNA
cgggaagcaagcagacgggccc

SEQ ID NO: 36145 - RNA, 22 nt, Artificial Sequence
  GATA2 Guide RNA
cgggagaggugggagcagcggc

SEQ ID NO: 36146 - RNA, 22 nt, Artificial Sequence
  GATA2 Guide RNA
cgucugcuugcuucccggaugu

SEQ ID NO: 36147 - RNA, 22 nt, Artificial Sequence
  GATA2 Guide RNA
cguggugaugagaacccaggcg

SEQ ID NO: 36148 - RNA, 22 nt, Artificial Sequence
  GATA2 Guide RNA
cuacauccgggaagcaagcaga

SEQ ID NO: 36149 - RNA, 22 nt, Artificial Sequence
  GATA2 Guide RNA
cuccuccccucccucgccuggc

SEQ ID NO: 36150 - RNA, 22 nt, Artificial Sequence
  GATA2 Guide RNA
cucgauuccugcggauccuaca

SEQ ID NO: 36151 - RNA, 22 nt, Artificial Sequence
  GATA2 Guide RNA
cugcggauccuacauccgggaa

SEQ ID NO: 36152 - RNA, 22 nt, Artificial Sequence
  GATA2 Guide RNA
cugcuugcuucccggauguagg

SEQ ID NO: 36153 - RNA, 22 nt, Artificial Sequence
  GATA2 Guide RNA
cugggcccguggugaugagaac

SEQ ID NO: 36154 - RNA, 22 nt, Artificial Sequence
  GATA2 Guide RNA
cuggguucucaucaccacgggc

SEQ ID NO: 36155 - RNA, 22 nt, Artificial Sequence
  GATA2 Guide RNA
cuucccggauguaggauccgca

SEQ ID NO: 36156 - RNA, 22 nt, Artificial Sequence
  GATA2 Guide RNA
cuugcuucccggauguaggauc

SEQ ID NO: 36157 - RNA, 22 nt, Artificial Sequence
  GATA2 Guide RNA
gaagcaagcagacgggcccucc

SEQ ID NO: 36158 - RNA, 22 nt, Artificial Sequence
  GATA2 Guide RNA
gacgggcccuccuccccucccu

SEQ ID NO: 36159 - RNA, 22 nt, Artificial Sequence
  GATA2 Guide RNA
gagcacugggcccguggugaug

SEQ ID NO: 36160 - RNA, 22 nt, Artificial Sequence
  GATA2 Guide RNA
gaggagggcccgucugcuugcu

SEQ ID NO: 36161 - RNA, 22 nt, Artificial Sequence
  GATA2 Guide RNA
gagggaggggaggagggcccgu

SEQ ID NO: 36162 - RNA, 22 nt, Artificial Sequence
  GATA2 Guide RNA
gagggcccgucugcuugcuucc

SEQ ID NO: 36163 - RNA, 22 nt, Artificial Sequence
  GATA2 Guide RNA
gaggggaggagggcccgucugc

SEQ ID NO: 36164 - RNA, 22 nt, Artificial Sequence
  GATA2 Guide RNA
gauccgcaggaaucgagcugcu

SEQ ID NO: 36165 - RNA, 22 nt, Artificial Sequence
  GATA2 Guide RNA
gauccuacauccgggaagcaag

SEQ ID NO: 36166 - RNA, 22 nt, Artificial Sequence
  GATA2 Guide RNA
gaugagaacccaggcgccgcgc

SEQ ID NO: 36167 - RNA, 22 nt, Artificial Sequence
  GATA2 Guide RNA
gauguaggauccgcaggaaucg

SEQ ID NO: 36168 - RNA, 22 nt, Artificial Sequence
  GATA2 Guide RNA
gauuccugcggauccuacaucc

SEQ ID NO: 36169 - RNA, 22 nt, Artificial Sequence
  GATA2 Guide RNA
gcaagcagacgggcccuccucc

SEQ ID NO: 36170 - RNA, 22 nt, Artificial Sequence
  GATA2 Guide RNA
gcacugggcccguggugaugag

SEQ ID NO: 36171 - RNA, 22 nt, Artificial Sequence
  GATA2 Guide RNA
gcagacgggcccuccuccccuc

SEQ ID NO: 36172 - RNA, 22 nt, Artificial Sequence
  GATA2 Guide RNA
gcagcucgauuccugcggaucc

SEQ ID NO: 36173 - RNA, 22 nt, Artificial Sequence
  GATA2 Guide RNA
gcaggaaucgagcugcugaaaa

SEQ ID NO: 36174 - RNA, 22 nt, Artificial Sequence
  GATA2 Guide RNA
gccaggcgagggaggggaggag

SEQ ID NO: 36175 - RNA, 22 nt, Artificial Sequence
  GATA2 Guide RNA
gcccgucugcuugcuucccgga

SEQ ID NO: 36176 - RNA, 22 nt, Artificial Sequence
  GATA2 Guide RNA
gcccguggugaugagaacccag

SEQ ID NO: 36177 - RNA, 22 nt, Artificial Sequence
  GATA2 Guide RNA
gcccuccuccccucccucgccu

SEQ ID NO: 36178 - RNA, 22 nt, Artificial Sequence
  GATA2 Guide RNA
gccuggguucucaucaccacgg

SEQ ID NO: 36179 - RNA, 22 nt, Artificial Sequence
  GATA2 Guide RNA
gcgccuggguucucaucaccac

SEQ ID NO: 36180 - RNA, 22 nt, Artificial Sequence
  GATA2 Guide RNA
gcgcgcggcgccuggguucuca

SEQ ID NO: 36181 - RNA, 22 nt, Artificial Sequence
  GATA2 Guide RNA
gcgcggcgccuggguucucauc

SEQ ID NO: 36182 - RNA, 22 nt, Artificial Sequence
  GATA2 Guide RNA
gcggauccuacauccgggaagc

SEQ ID NO: 36183 - RNA, 22 nt, Artificial Sequence
  GATA2 Guide RNA
gcggcgccuggguucucaucac

SEQ ID NO: 36184 - RNA, 22 nt, Artificial Sequence
  GATA2 Guide RNA
gcucgauuccugcggauccuac

SEQ ID NO: 36185 - RNA, 22 nt, Artificial Sequence
  GATA2 Guide RNA
gcuucccggauguaggauccgc

SEQ ID NO: 36186 - RNA, 22 nt, Artificial Sequence
  GATA2 Guide RNA
gcuugcuucccggauguaggau

SEQ ID NO: 36187 - RNA, 22 nt, Artificial Sequence
  GATA2 Guide RNA
ggaagcaagcagacgggcccuc

SEQ ID NO: 36188 - RNA, 22 nt, Artificial Sequence
  GATA2 Guide RNA
ggaaucgagcugcugaaaaauu

SEQ ID NO: 36189 - RNA, 22 nt, Artificial Sequence
  GATA2 Guide RNA
ggaggagggcccgucugcuugc

SEQ ID NO: 36190 - RNA, 22 nt, Artificial Sequence
  GATA2 Guide RNA
ggagggcccgucugcuugcuuc

SEQ ID NO: 36191 - RNA, 22 nt, Artificial Sequence
  GATA2 Guide RNA
ggaggggaggagggcccgucug

SEQ ID NO: 36192 - RNA, 22 nt, Artificial Sequence
  GATA2 Guide RNA
ggauccgcaggaaucgagcugc

SEQ ID NO: 36193 - RNA, 22 nt, Artificial Sequence
  GATA2 Guide RNA
ggauccuacauccgggaagcaa

SEQ ID NO: 36194 - RNA, 22 nt, Artificial Sequence
  GATA2 Guide RNA
ggauguaggauccgcaggaauc

SEQ ID NO: 36195 - RNA, 22 nt, Artificial Sequence
  GATA2 Guide RNA
ggcccgucugcuugcuucccgg

SEQ ID NO: 36196 - RNA, 22 nt, Artificial Sequence
  GATA2 Guide RNA
ggcccguggugaugagaaccca

SEQ ID NO: 36197 - RNA, 22 nt, Artificial Sequence
  GATA2 Guide RNA
ggcgccuggguucucaucacca

SEQ ID NO: 36198 - RNA, 22 nt, Artificial Sequence
  GATA2 Guide RNA
gggaagcaagcagacgggcccu

SEQ ID NO: 36199 - RNA, 22 nt, Artificial Sequence
  GATA2 Guide RNA
gggaggagggcccgucugcuug

SEQ ID NO: 36200 - RNA, 22 nt, Artificial Sequence
  GATA2 Guide RNA
gggaggggaggagggcccgucu

SEQ ID NO: 36201 - RNA, 22 nt, Artificial Sequence
  GATA2 Guide RNA
gggcccgucugcuugcuucccg

SEQ ID NO: 36202 - RNA, 22 nt, Artificial Sequence
  GATA2 Guide RNA
gggcccguggugaugagaaccc

SEQ ID NO: 36203 - RNA, 22 nt, Artificial Sequence
  GATA2 Guide RNA
ggggaggagggcccgucugcuu

SEQ ID NO: 36204 - RNA, 22 nt, Artificial Sequence
  GATA2 Guide RNA
ggguucucaucaccacgggccc

SEQ ID NO: 36205 - RNA, 22 nt, Artificial Sequence
  GATA2 Guide RNA
ggugaugagaacccaggcgccg

SEQ ID NO: 36206 - RNA, 22 nt, Artificial Sequence
  GATA2 Guide RNA
gguucucaucaccacgggccca

SEQ ID NO: 36207 - RNA, 22 nt, Artificial Sequence
  GATA2 Guide RNA
guaggauccgcaggaaucgagc

SEQ ID NO: 36208 - RNA, 22 nt, Artificial Sequence
  GATA2 Guide RNA
gucugcuugcuucccggaugua

SEQ ID NO: 36209 - RNA, 22 nt, Artificial Sequence
  GATA2 Guide RNA
gugaugagaacccaggcgccgc

SEQ ID NO: 36210 - RNA, 22 nt, Artificial Sequence
  GATA2 Guide RNA
guggugaugagaacccaggcgc

SEQ ID NO: 36211 - RNA, 22 nt, Artificial Sequence
  GATA2 Guide RNA
guucucaucaccacgggcccag

SEQ ID NO: 36212 - RNA, 22 nt, Artificial Sequence
  GATA2 Guide RNA
uacauccgggaagcaagcagac

SEQ ID NO: 36213 - RNA, 22 nt, Artificial Sequence
  GATA2 Guide RNA
uaggauccgcaggaaucgagcu

SEQ ID NO: 36214 - RNA, 22 nt, Artificial Sequence
  GATA2 Guide RNA
ucagcagcucgauuccugcgga

SEQ ID NO: 36215 - RNA, 22 nt, Artificial Sequence
  GATA2 Guide RNA
ucccggauguaggauccgcagg

SEQ ID NO: 36216 - RNA, 22 nt, Artificial Sequence
  GATA2 Guide RNA
uccgcaggaaucgagcugcuga

SEQ ID NO: 36217 - RNA, 22 nt, Artificial Sequence
  GATA2 Guide RNA
uccgggaagcaagcagacgggc

SEQ ID NO: 36218 - RNA, 22 nt, Artificial Sequence
  GATA2 Guide RNA
uccuacauccgggaagcaagca

SEQ ID NO: 36219 - RNA, 22 nt, Artificial Sequence
  GATA2 Guide RNA
uccuccccucccucgccuggcg

SEQ ID NO: 36220 - RNA, 22 nt, Artificial Sequence
  GATA2 Guide RNA
uccugcggauccuacauccggg

SEQ ID NO: 36221 - RNA, 22 nt, Artificial Sequence
  GATA2 Guide RNA
ucgauuccugcggauccuacau

SEQ ID NO: 36222 - RNA, 22 nt, Artificial Sequence
  GATA2 Guide RNA
ucugcuugcuucccggauguag

SEQ ID NO: 36223 - RNA, 22 nt, Artificial Sequence
  GATA2 Guide RNA
ugagaacccaggcgccgcgcgc

SEQ ID NO: 36224 - RNA, 22 nt, Artificial Sequence
  GATA2 Guide RNA
ugaugagaacccaggcgccgcg

SEQ ID NO: 36225 - RNA, 22 nt, Artificial Sequence
  GATA2 Guide RNA
ugcggauccuacauccgggaag

SEQ ID NO: 36226 - RNA, 22 nt, Artificial Sequence
  GATA2 Guide RNA
ugcuucccggauguaggauccg

SEQ ID NO: 36227 - RNA, 22 nt, Artificial Sequence
  GATA2 Guide RNA
ugcuugcuucccggauguagga

SEQ ID NO: 36228 - RNA, 22 nt, Artificial Sequence
  GATA2 Guide RNA
uggcgcgcggcgccuggguucu

SEQ ID NO: 36229 - RNA, 22 nt, Artificial Sequence
  GATA2 Guide RNA
ugggcccguggugaugagaacc

SEQ ID NO: 36230 - RNA, 22 nt, Artificial Sequence
  GATA2 Guide RNA
uggguucucaucaccacgggcc

SEQ ID NO: 36231 - RNA, 22 nt, Artificial Sequence
  GATA2 Guide RNA
uggugaugagaacccaggcgcc

SEQ ID NO: 36232 - RNA, 22 nt, Artificial Sequence
  GATA2 Guide RNA
uguaggauccgcaggaaucgag

SEQ ID NO: 36233 - RNA, 22 nt, Artificial Sequence
  GATA2 Guide RNA
uucagcagcucgauuccugcgg

SEQ ID NO: 36234 - RNA, 22 nt, Artificial Sequence
  GATA2 Guide RNA
uucccggauguaggauccgcag

SEQ ID NO: 36235 - RNA, 22 nt, Artificial Sequence
  GATA2 Guide RNA
uuccugcggauccuacauccgg

SEQ ID NO: 36236 - RNA, 22 nt, Artificial Sequence
  GATA2 Guide RNA
uucucaucaccacgggcccagu

SEQ ID NO: 36237 - RNA, 22 nt, Artificial Sequence
  GATA2 Guide RNA
uugcuucccggauguaggaucc

SEQ ID NO: 36238 - RNA, 22 nt, Artificial Sequence
  GATA2 Guide RNA
uuucagcagcucgauuccugcg

SEQ ID NO: 36239 - RNA, 22 nt, Artificial Sequence
  GATA2 Guide RNA
uuuucagcagcucgauuccugc

SEQ ID NO: 36240 - RNA, 22 nt, Artificial Sequence
  GATA2 Guide RNA
uuuuucagcagcucgauuccug

SEQ ID NO: 36241 - RNA, 20 nt, Artificial Sequence
  GATA2 Guide RNA
aaacgaaggaggaggggagg

SEQ ID NO: 36242 - RNA, 20 nt, Artificial Sequence
  GATA2 Guide RNA
aaagcagccagccgagcagu

SEQ ID NO: 36243 - RNA, 20 nt, Artificial Sequence
  GATA2 Guide RNA
aaagccaaauccccugcuuc

SEQ ID NO: 36244 - RNA, 20 nt, Artificial Sequence
  GATA2 Guide RNA
aaaguuugcaguaaauaccc

SEQ ID NO: 36245 - RNA, 20 nt, Artificial Sequence
  GATA2 Guide RNA
aaauacccuccugguugcuc

SEQ ID NO: 36246 - RNA, 20 nt, Artificial Sequence
  GATA2 Guide RNA
aaauccccugcuuccaaucc

SEQ ID NO: 36247 - RNA, 20 nt, Artificial Sequence
  GATA2 Guide RNA
aacagccugggcaggaagag

SEQ ID NO: 36248 - RNA, 20 nt, Artificial Sequence
  GATA2 Guide RNA
aaccaggaggguauuuacug

SEQ ID NO: 36249 - RNA, 20 nt, Artificial Sequence
  GATA2 Guide RNA
aaccggcaaguucucgggag

SEQ ID NO: 36250 - RNA, 20 nt, Artificial Sequence
  GATA2 Guide RNA
aaccgugugccugagaggca

SEQ ID NO: 36251 - RNA, 20 nt, Artificial Sequence
  GATA2 Guide RNA
aacgaaggaggaggggagga

SEQ ID NO: 36252 - RNA, 20 nt, Artificial Sequence
  GATA2 Guide RNA
aacgccuggggcccugggcc

SEQ ID NO: 36253 - RNA, 20 nt, Artificial Sequence
  GATA2 Guide RNA
aacuugccgguuaagcaggc

SEQ ID NO: 36254 - RNA, 20 nt, Artificial Sequence
  GATA2 Guide RNA
aagcagccagccgagcagug

SEQ ID NO: 36255 - RNA, 20 nt, Artificial Sequence
  GATA2 Guide RNA
aagcaggggauuuggcuuua

SEQ ID NO: 36256 - RNA, 20 nt, Artificial Sequence
  GATA2 Guide RNA
aagccaaauccccugcuucc

SEQ ID NO: 36257 - RNA, 20 nt, Artificial Sequence
  GATA2 Guide RNA
aaggaggaggggaggagggg

SEQ ID NO: 36258 - RNA, 20 nt, Artificial Sequence
  GATA2 Guide RNA
aaguucucgggagggagucc

SEQ ID NO: 36259 - RNA, 20 nt, Artificial Sequence
  GATA2 Guide RNA
aaguuugcaguaaauacccu

SEQ ID NO: 36260 - RNA, 20 nt, Artificial Sequence
  GATA2 Guide RNA
aauacccuccugguugcucc

SEQ ID NO: 36261 - RNA, 20 nt, Artificial Sequence
  GATA2 Guide RNA
aauccccugcuuccaauccu

SEQ ID NO: 36262 - RNA, 20 nt, Artificial Sequence
  GATA2 Guide RNA
aauccucaccaggagggaug

SEQ ID NO: 36263 - RNA, 20 nt, Artificial Sequence
  GATA2 Guide RNA
acacgggggccugcuuaacc

SEQ ID NO: 36264 - RNA, 20 nt, Artificial Sequence
  GATA2 Guide RNA
acacgguuggccugggccug

SEQ ID NO: 36265 - RNA, 20 nt, Artificial Sequence
  GATA2 Guide RNA
acagccugggcaggaagagg

SEQ ID NO: 36266 - RNA, 20 nt, Artificial Sequence
  GATA2 Guide RNA
accaggagggauggaaacga

SEQ ID NO: 36267 - RNA, 20 nt, Artificial Sequence
  GATA2 Guide RNA
accaggaggguauuuacugc

SEQ ID NO: 36268 - RNA, 20 nt, Artificial Sequence
  GATA2 Guide RNA
acccuccugguugcuccaga

SEQ ID NO: 36269 - RNA, 20 nt, Artificial Sequence
  GATA2 Guide RNA
accggcaaguucucgggagg

SEQ ID NO: 36270 - RNA, 20 nt, Artificial Sequence
  GATA2 Guide RNA
accggcacugcucggcuggc

SEQ ID NO: 36271 - RNA, 20 nt, Artificial Sequence
  GATA2 Guide RNA
accgugugccugagaggcac

SEQ ID NO: 36272 - RNA, 20 nt, Artificial Sequence
  GATA2 Guide RNA
acgaaggaggaggggaggag

SEQ ID NO: 36273 - RNA, 20 nt, Artificial Sequence
  GATA2 Guide RNA
acgggggccugcuuaaccgg

SEQ ID NO: 36274 - RNA, 20 nt, Artificial Sequence
  GATA2 Guide RNA
acgguuggccugggccuggc

SEQ ID NO: 36275 - RNA, 20 nt, Artificial Sequence
  GATA2 Guide RNA
acucccucccgagaacuugc

SEQ ID NO: 36276 - RNA, 20 nt, Artificial Sequence
  GATA2 Guide RNA
acugcucggcuggcugcuuu

SEQ ID NO: 36277 - RNA, 20 nt, Artificial Sequence
  GATA2 Guide RNA
acuugccgguuaagcaggcc

SEQ ID NO: 36278 - RNA, 20 nt, Artificial Sequence
  GATA2 Guide RNA
agaacgccuggggcccuggg

SEQ ID NO: 36279 - RNA, 20 nt, Artificial Sequence
  GATA2 Guide RNA
agaacuugccgguuaagcag

SEQ ID NO: 36280 - RNA, 20 nt, Artificial Sequence
  GATA2 Guide RNA
agacacgggggccugcuuaa

SEQ ID NO: 36281 - RNA, 20 nt, Artificial Sequence
  GATA2 Guide RNA
agaggcaccggcacugcucg

SEQ ID NO: 36282 - RNA, 20 nt, Artificial Sequence
  GATA2 Guide RNA
agagggucucccacauggga

SEQ ID NO: 36283 - RNA, 20 nt, Artificial Sequence
  GATA2 Guide RNA
agagucguuuaaagccaaau

SEQ ID NO: 36284 - RNA, 20 nt, Artificial Sequence
  GATA2 Guide RNA
agcaaccaggaggguauuua

SEQ ID NO: 36285 - RNA, 20 nt, Artificial Sequence
  GATA2 Guide RNA
agcagccagccgagcagugc

SEQ ID NO: 36286 - RNA, 20 nt, Artificial Sequence
  GATA2 Guide RNA
agcaggggauuuggcuuuaa

SEQ ID NO: 36287 - RNA, 20 nt, Artificial Sequence
  GATA2 Guide RNA
agcagugccggugccucuca

SEQ ID NO: 36288 - RNA, 20 nt, Artificial Sequence
  GATA2 Guide RNA
agccaaauccccugcuucca

SEQ ID NO: 36289 - RNA, 20 nt, Artificial Sequence
  GATA2 Guide RNA
agccagccgagcagugccgg

SEQ ID NO: 36290 - RNA, 20 nt, Artificial Sequence
  GATA2 Guide RNA
agccaggcccaggccaaccg

SEQ ID NO: 36291 - RNA, 20 nt, Artificial Sequence
  GATA2 Guide RNA
agccgagcagugccggugcc

SEQ ID NO: 36292 - RNA, 20 nt, Artificial Sequence
  GATA2 Guide RNA
aggaaagcagccagccgagc

SEQ ID NO: 36293 - RNA, 20 nt, Artificial Sequence
  GATA2 Guide RNA
aggaggaggggaggaggggc

SEQ ID NO: 36294 - RNA, 20 nt, Artificial Sequence
  GATA2 Guide RNA
aggagggauggaaacgaagg

SEQ ID NO: 36295 - RNA, 20 nt, Artificial Sequence
  GATA2 Guide RNA
aggaggggaggaggggccca

SEQ ID NO: 36296 - RNA, 20 nt, Artificial Sequence
  GATA2 Guide RNA
aggaggggcccagggcccca

SEQ ID NO: 36297 - RNA, 20 nt, Artificial Sequence
  GATA2 Guide RNA
aggaggguauuuacugcaaa

SEQ ID NO: 36298 - RNA, 20 nt, Artificial Sequence
  GATA2 Guide RNA
aggauuggaagcaggggauu

SEQ ID NO: 36299 - RNA, 20 nt, Artificial Sequence
  GATA2 Guide RNA
aggcacacgguuggccuggg

SEQ ID NO: 36300 - RNA, 20 nt, Artificial Sequence
  GATA2 Guide RNA
aggcaccggcacugcucggc

SEQ ID NO: 36301 - RNA, 20 nt, Artificial Sequence
  GATA2 Guide RNA
aggccaaccgugugccugag

SEQ ID NO: 36302 - RNA, 20 nt, Artificial Sequence
  GATA2 Guide RNA
aggcccaggccaaccgugug

SEQ ID NO: 36303 - RNA, 20 nt, Artificial Sequence
  GATA2 Guide RNA
aggcguucuggagcaaccag

SEQ ID NO: 36304 - RNA, 20 nt, Artificial Sequence
  GATA2 Guide RNA
aggcuguugcagccaggccc

SEQ ID NO: 36305 - RNA, 20 nt, Artificial Sequence
  GATA2 Guide RNA
agggaguccagggcaggaaa

SEQ ID NO: 36306 - RNA, 20 nt, Artificial Sequence
  GATA2 Guide RNA
agggauggaaacgaaggagg

SEQ ID NO: 36307 - RNA, 20 nt, Artificial Sequence
  GATA2 Guide RNA
agggcaggaaagcagccagc

SEQ ID NO: 36308 - RNA, 20 nt, Artificial Sequence
  GATA2 Guide RNA
agggccccaggcguucugga

SEQ ID NO: 36309 - RNA, 20 nt, Artificial Sequence
  GATA2 Guide RNA
aggggaggaggggcccaggg

SEQ ID NO: 36310 - RNA, 20 nt, Artificial Sequence
  GATA2 Guide RNA
aggggauuuggcuuuaaacg

SEQ ID NO: 36311 - RNA, 20 nt, Artificial Sequence
  GATA2 Guide RNA
agggucucccacaugggagg

SEQ ID NO: 36312 - RNA, 20 nt, Artificial Sequence
  GATA2 Guide RNA
aguaaauacccuccugguug

SEQ ID NO: 36313 - RNA, 20 nt, Artificial Sequence
  GATA2 Guide RNA
aguccagggcaggaaagcag

SEQ ID NO: 36314 - RNA, 20 nt, Artificial Sequence
  GATA2 Guide RNA
agucguuuaaagccaaaucc

SEQ ID NO: 36315 - RNA, 20 nt, Artificial Sequence
  GATA2 Guide RNA
agugccggugccucucaggc

SEQ ID NO: 36316 - RNA, 20 nt, Artificial Sequence
  GATA2 Guide RNA
aguucucgggagggagucca

SEQ ID NO: 36317 - RNA, 20 nt, Artificial Sequence
  GATA2 Guide RNA
aguuugcaguaaauacccuc

SEQ ID NO: 36318 - RNA, 20 nt, Artificial Sequence
  GATA2 Guide RNA
auacccuccugguugcucca

SEQ ID NO: 36319 - RNA, 20 nt, Artificial Sequence
  GATA2 Guide RNA
auccccugcuuccaauccuc

SEQ ID NO: 36320 - RNA, 20 nt, Artificial Sequence
  GATA2 Guide RNA
aucccuccuggugaggauug

SEQ ID NO: 36321 - RNA, 20 nt, Artificial Sequence
  GATA2 Guide RNA
auccucaccaggagggaugg

SEQ ID NO: 36322 - RNA, 20 nt, Artificial Sequence
  GATA2 Guide RNA
auggaaacgaaggaggaggg

SEQ ID NO: 36323 - RNA, 20 nt, Artificial Sequence
  GATA2 Guide RNA
auuggaagcaggggauuugg

SEQ ID NO: 36324 - RNA, 20 nt, Artificial Sequence
  GATA2 Guide RNA
auuuggcuuuaaacgacucu

SEQ ID NO: 36325 - RNA, 20 nt, Artificial Sequence
  GATA2 Guide RNA
caaaguuugcaguaaauacc

SEQ ID NO: 36326 - RNA, 20 nt, Artificial Sequence
  GATA2 Guide RNA
caaauccccugcuuccaauc

SEQ ID NO: 36327 - RNA, 20 nt, Artificial Sequence
  GATA2 Guide RNA
caacagccugggcaggaaga

SEQ ID NO: 36328 - RNA, 20 nt, Artificial Sequence
  GATA2 Guide RNA
caaccaggaggguauuuacu

SEQ ID NO: 36329 - RNA, 20 nt, Artificial Sequence
  GATA2 Guide RNA
caaccgugugccugagaggc

SEQ ID NO: 36330 - RNA, 20 nt, Artificial Sequence
  GATA2 Guide RNA
caaguucucgggagggaguc

SEQ ID NO: 36331 - RNA, 20 nt, Artificial Sequence
  GATA2 Guide RNA
caauccucaccaggagggau

SEQ ID NO: 36332 - RNA, 20 nt, Artificial Sequence
  GATA2 Guide RNA
cacacgguuggccugggccu

SEQ ID NO: 36333 - RNA, 20 nt, Artificial Sequence
  GATA2 Guide RNA
caccaggagggauggaaacg

SEQ ID NO: 36334 - RNA, 20 nt, Artificial Sequence
  GATA2 Guide RNA
caccggcacugcucggcugg

SEQ ID NO: 36335 - RNA, 20 nt, Artificial Sequence
  GATA2 Guide RNA
cacgggggccugcuuaaccg

SEQ ID NO: 36336 - RNA, 20 nt, Artificial Sequence
  GATA2 Guide RNA
cacgguuggccugggccugg

SEQ ID NO: 36337 - RNA, 20 nt, Artificial Sequence
  GATA2 Guide RNA
cacugcucggcuggcugcuu

SEQ ID NO: 36338 - RNA, 20 nt, Artificial Sequence
  GATA2 Guide RNA
cagaacgccuggggcccugg

SEQ ID NO: 36339 - RNA, 20 nt, Artificial Sequence
  GATA2 Guide RNA
cagagucguuuaaagccaaa

SEQ ID NO: 36340 - RNA, 20 nt, Artificial Sequence
  GATA2 Guide RNA
cagccagccgagcagugccg

SEQ ID NO: 36341 - RNA, 20 nt, Artificial Sequence
  GATA2 Guide RNA
cagccaggcccaggccaacc

SEQ ID NO: 36342 - RNA, 20 nt, Artificial Sequence
  GATA2 Guide RNA
cagccgagcagugccggugc

SEQ ID NO: 36343 - RNA, 20 nt, Artificial Sequence
  GATA2 Guide RNA
caggaaagcagccagccgag

SEQ ID NO: 36344 - RNA, 20 nt, Artificial Sequence
  GATA2 Guide RNA
caggagggauggaaacgaag

SEQ ID NO: 36345 - RNA, 20 nt, Artificial Sequence
  GATA2 Guide RNA
caggaggguauuuacugcaa

SEQ ID NO: 36346 - RNA, 20 nt, Artificial Sequence
  GATA2 Guide RNA
caggcacacgguuggccugg

SEQ ID NO: 36347 - RNA, 20 nt, Artificial Sequence
  GATA2 Guide RNA
caggccaaccgugugccuga

SEQ ID NO: 36348 - RNA, 20 nt, Artificial Sequence
  GATA2 Guide RNA
caggcccaggccaaccgugu

SEQ ID NO: 36349 - RNA, 20 nt, Artificial Sequence
  GATA2 Guide RNA
caggcguucuggagcaacca

SEQ ID NO: 36350 - RNA, 20 nt, Artificial Sequence
  GATA2 Guide RNA
caggcuguugcagccaggcc

SEQ ID NO: 36351 - RNA, 20 nt, Artificial Sequence
  GATA2 Guide RNA
cagggcaggaaagcagccag

SEQ ID NO: 36352 - RNA, 20 nt, Artificial Sequence
  GATA2 Guide RNA
cagggccccaggcguucugg

SEQ ID NO: 36353 - RNA, 20 nt, Artificial Sequence
  GATA2 Guide RNA
caggggauuuggcuuuaaac

SEQ ID NO: 36354 - RNA, 20 nt, Artificial Sequence
  GATA2 Guide RNA
caguaaauacccuccugguu

SEQ ID NO: 36355 - RNA, 20 nt, Artificial Sequence
  GATA2 Guide RNA
cagugccggugccucucagg

SEQ ID NO: 36356 - RNA, 20 nt, Artificial Sequence
  GATA2 Guide RNA
caucccuccuggugaggauu

SEQ ID NO: 36357 - RNA, 20 nt, Artificial Sequence
  GATA2 Guide RNA
ccaaauccccugcuuccaau

SEQ ID NO: 36358 - RNA, 20 nt, Artificial Sequence
  GATA2 Guide RNA
ccaaccgugugccugagagg

SEQ ID NO: 36359 - RNA, 20 nt, Artificial Sequence
  GATA2 Guide RNA
ccaauccucaccaggaggga

SEQ ID NO: 36360 - RNA, 20 nt, Artificial Sequence
  GATA2 Guide RNA
ccagaacgccuggggcccug

SEQ ID NO: 36361 - RNA, 20 nt, Artificial Sequence
  GATA2 Guide RNA
ccagagucguuuaaagccaa

SEQ ID NO: 36362 - RNA, 20 nt, Artificial Sequence
  GATA2 Guide RNA
ccagccgagcagugccggug

SEQ ID NO: 36363 - RNA, 20 nt, Artificial Sequence
  GATA2 Guide RNA
ccaggagggauggaaacgaa

SEQ ID NO: 36364 - RNA, 20 nt, Artificial Sequence
  GATA2 Guide RNA
ccaggaggguauuuacugca

SEQ ID NO: 36365 - RNA, 20 nt, Artificial Sequence
  GATA2 Guide RNA
ccaggccaaccgugugccug

SEQ ID NO: 36366 - RNA, 20 nt, Artificial Sequence
  GATA2 Guide RNA
ccaggcccaggccaaccgug

SEQ ID NO: 36367 - RNA, 20 nt, Artificial Sequence
  GATA2 Guide RNA
ccaggcguucuggagcaacc

SEQ ID NO: 36368 - RNA, 20 nt, Artificial Sequence
  GATA2 Guide RNA
ccaggcuguugcagccaggc

SEQ ID NO: 36369 - RNA, 20 nt, Artificial Sequence
  GATA2 Guide RNA
ccagggcaggaaagcagcca

SEQ ID NO: 36370 - RNA, 20 nt, Artificial Sequence
  GATA2 Guide RNA
ccagggccccaggcguucug

SEQ ID NO: 36371 - RNA, 20 nt, Artificial Sequence
  GATA2 Guide RNA
ccaucccuccuggugaggau

SEQ ID NO: 36372 - RNA, 20 nt, Artificial Sequence
  GATA2 Guide RNA
cccaggccaaccgugugccu

SEQ ID NO: 36373 - RNA, 20 nt, Artificial Sequence
  GATA2 Guide RNA
cccaggcguucuggagcaac

SEQ ID NO: 36374 - RNA, 20 nt, Artificial Sequence
  GATA2 Guide RNA
cccaggcuguugcagccagg

SEQ ID NO: 36375 - RNA, 20 nt, Artificial Sequence
  GATA2 Guide RNA
cccagggccccaggcguucu

SEQ ID NO: 36376 - RNA, 20 nt, Artificial Sequence
  GATA2 Guide RNA
ccccaggcguucuggagcaa

SEQ ID NO: 36377 - RNA, 20 nt, Artificial Sequence
  GATA2 Guide RNA
cccccucccaugugggagac

SEQ ID NO: 36378 - RNA, 20 nt, Artificial Sequence
  GATA2 Guide RNA
ccccucccaugugggagacc

SEQ ID NO: 36379 - RNA, 20 nt, Artificial Sequence
  GATA2 Guide RNA
ccccuccuccccuccuccuu

SEQ ID NO: 36380 - RNA, 20 nt, Artificial Sequence
  GATA2 Guide RNA
ccccuccuccuucguuucca

SEQ ID NO: 36381 - RNA, 20 nt, Artificial Sequence
  GATA2 Guide RNA
ccccugcuuccaauccucac

SEQ ID NO: 36382 - RNA, 20 nt, Artificial Sequence
  GATA2 Guide RNA
cccgagaacuugccgguuaa

SEQ ID NO: 36383 - RNA, 20 nt, Artificial Sequence
  GATA2 Guide RNA
cccucccgagaacuugccgg

SEQ ID NO: 36384 - RNA, 20 nt, Artificial Sequence
  GATA2 Guide RNA
cccuccuccccuccuccuuc

SEQ ID NO: 36385 - RNA, 20 nt, Artificial Sequence
  GATA2 Guide RNA
cccuccuccuucguuuccau

SEQ ID NO: 36386 - RNA, 20 nt, Artificial Sequence
  GATA2 Guide RNA
cccuccuggugaggauugga

SEQ ID NO: 36387 - RNA, 20 nt, Artificial Sequence
  GATA2 Guide RNA
cccuccugguugcuccagaa

SEQ ID NO: 36388 - RNA, 20 nt, Artificial Sequence
  GATA2 Guide RNA
cccucuuccugcccaggcug

SEQ ID NO: 36389 - RNA, 20 nt, Artificial Sequence
  GATA2 Guide RNA
cccugcuuccaauccucacc

SEQ ID NO: 36390 - RNA, 20 nt, Artificial Sequence
  GATA2 Guide RNA
cccuggacucccucccgaga

SEQ ID NO: 36391 - RNA, 20 nt, Artificial Sequence
  GATA2 Guide RNA
cccugggccccuccuccccu

SEQ ID NO: 36392 - RNA, 20 nt, Artificial Sequence
  GATA2 Guide RNA
ccgagaacuugccgguuaag

SEQ ID NO: 36393 - RNA, 20 nt, Artificial Sequence
  GATA2 Guide RNA
ccgagcagugccggugccuc

SEQ ID NO: 36394 - RNA, 20 nt, Artificial Sequence
  GATA2 Guide RNA
ccggcaaguucucgggaggg

SEQ ID NO: 36395 - RNA, 20 nt, Artificial Sequence
  GATA2 Guide RNA
ccggcacugcucggcuggcu

SEQ ID NO: 36396 - RNA, 20 nt, Artificial Sequence
  GATA2 Guide RNA
ccggugccucucaggcacac

SEQ ID NO: 36397 - RNA, 20 nt, Artificial Sequence
  GATA2 Guide RNA
ccgguuaagcaggcccccgu

SEQ ID NO: 36398 - RNA, 20 nt, Artificial Sequence
  GATA2 Guide RNA
ccgugugccugagaggcacc

SEQ ID NO: 36399 - RNA, 20 nt, Artificial Sequence
  GATA2 Guide RNA
ccucaccaggagggauggaa

SEQ ID NO: 36400 - RNA, 20 nt, Artificial Sequence
  GATA2 Guide RNA
ccuccccuccuccuucguuu

SEQ ID NO: 36401 - RNA, 20 nt, Artificial Sequence
  GATA2 Guide RNA
ccucccgagaacuugccggu

SEQ ID NO: 36402 - RNA, 20 nt, Artificial Sequence
  GATA2 Guide RNA
ccuccuccccuccuccuucg

SEQ ID NO: 36403 - RNA, 20 nt, Artificial Sequence
  GATA2 Guide RNA
ccuccuccuucguuuccauc

SEQ ID NO: 36404 - RNA, 20 nt, Artificial Sequence
  GATA2 Guide RNA
ccuccuggugaggauuggaa

SEQ ID NO: 36405 - RNA, 20 nt, Artificial Sequence
  GATA2 Guide RNA
ccuccugguugcuccagaac

SEQ ID NO: 36406 - RNA, 20 nt, Artificial Sequence
  GATA2 Guide RNA
ccuccuucguuuccaucccu

SEQ ID NO: 36407 - RNA, 20 nt, Artificial Sequence
  GATA2 Guide RNA
ccucucaggcacacgguugg

SEQ ID NO: 36408 - RNA, 20 nt, Artificial Sequence
  GATA2 Guide RNA
ccucuuccugcccaggcugu

SEQ ID NO: 36409 - RNA, 20 nt, Artificial Sequence
  GATA2 Guide RNA
ccugagaggcaccggcacug

SEQ ID NO: 36410 - RNA, 20 nt, Artificial Sequence
  GATA2 Guide RNA
ccugcccaggcuguugcagc

SEQ ID NO: 36411 - RNA, 20 nt, Artificial Sequence
  GATA2 Guide RNA
ccugcccuggacucccuccc

SEQ ID NO: 36412 - RNA, 20 nt, Artificial Sequence
  GATA2 Guide RNA
ccugcuuaaccggcaaguuc

SEQ ID NO: 36413 - RNA, 20 nt, Artificial Sequence
  GATA2 Guide RNA
ccugcuuccaauccucacca

SEQ ID NO: 36414 - RNA, 20 nt, Artificial Sequence
  GATA2 Guide RNA
ccuggacucccucccgagaa

SEQ ID NO: 36415 - RNA, 20 nt, Artificial Sequence
  GATA2 Guide RNA
ccuggcugcaacagccuggg

SEQ ID NO: 36416 - RNA, 20 nt, Artificial Sequence
  GATA2 Guide RNA
ccugggccccuccuccccuc

SEQ ID NO: 36417 - RNA, 20 nt, Artificial Sequence
  GATA2 Guide RNA
ccugggccuggcugcaacag

SEQ ID NO: 36418 - RNA, 20 nt, Artificial Sequence
  GATA2 Guide RNA
ccuggugaggauuggaagca

SEQ ID NO: 36419 - RNA, 20 nt, Artificial Sequence
  GATA2 Guide RNA
ccugguugcuccagaacgcc

SEQ ID NO: 36420 - RNA, 20 nt, Artificial Sequence
  GATA2 Guide RNA
ccuucguuuccaucccuccu

SEQ ID NO: 36421 - RNA, 20 nt, Artificial Sequence
  GATA2 Guide RNA
cgaaggaggaggggaggagg

SEQ ID NO: 36422 - RNA, 20 nt, Artificial Sequence
  GATA2 Guide RNA
cgagaacuugccgguuaagc

SEQ ID NO: 36423 - RNA, 20 nt, Artificial Sequence
  GATA2 Guide RNA
cgagcagugccggugccucu

SEQ ID NO: 36424 - RNA, 20 nt, Artificial Sequence
  GATA2 Guide RNA
cggcaaguucucgggaggga

SEQ ID NO: 36425 - RNA, 20 nt, Artificial Sequence
  GATA2 Guide RNA
cggcacugcucggcuggcug

SEQ ID NO: 36426 - RNA, 20 nt, Artificial Sequence
  GATA2 Guide RNA
cggcuggcugcuuuccugcc

SEQ ID NO: 36427 - RNA, 20 nt, Artificial Sequence
  GATA2 Guide RNA
cgggagggaguccagggcag

SEQ ID NO: 36428 - RNA, 20 nt, Artificial Sequence
  GATA2 Guide RNA
cgggggccugcuuaaccggc

SEQ ID NO: 36429 - RNA, 20 nt, Artificial Sequence
  GATA2 Guide RNA
cggugccucucaggcacacg

SEQ ID NO: 36430 - RNA, 20 nt, Artificial Sequence
  GATA2 Guide RNA
cgguuggccugggccuggcu

SEQ ID NO: 36431 - RNA, 20 nt, Artificial Sequence
  GATA2 Guide RNA
cgucccucuuccugcccagg

SEQ ID NO: 36432 - RNA, 20 nt, Artificial Sequence
  GATA2 Guide RNA
cgugugccugagaggcaccg

SEQ ID NO: 36433 - RNA, 20 nt, Artificial Sequence
  GATA2 Guide RNA
cguucuggagcaaccaggag

SEQ ID NO: 36434 - RNA, 20 nt, Artificial Sequence
  GATA2 Guide RNA
cguuuaaagccaaauccccu

SEQ ID NO: 36435 - RNA, 20 nt, Artificial Sequence
  GATA2 Guide RNA
cguuuccaucccuccuggug

SEQ ID NO: 36436 - RNA, 20 nt, Artificial Sequence
  GATA2 Guide RNA
cucaccaggagggauggaaa

SEQ ID NO: 36437 - RNA, 20 nt, Artificial Sequence
  GATA2 Guide RNA
cucaggcacacgguuggccu

SEQ ID NO: 36438 - RNA, 20 nt, Artificial Sequence
  GATA2 Guide RNA
cuccagaacgccuggggccc

SEQ ID NO: 36439 - RNA, 20 nt, Artificial Sequence
  GATA2 Guide RNA
cuccccuccuccuucguuuc

SEQ ID NO: 36440 - RNA, 20 nt, Artificial Sequence
  GATA2 Guide RNA
cucccgagaacuugccgguu

SEQ ID NO: 36441 - RNA, 20 nt, Artificial Sequence
  GATA2 Guide RNA
cucccucccgagaacuugcc

SEQ ID NO: 36442 - RNA, 20 nt, Artificial Sequence
  GATA2 Guide RNA
cuccuccccuccuccuucgu

SEQ ID NO: 36443 - RNA, 20 nt, Artificial Sequence
  GATA2 Guide RNA
cuccuccuucguuuccaucc

SEQ ID NO: 36444 - RNA, 20 nt, Artificial Sequence
  GATA2 Guide RNA
cuccuggugaggauuggaag

SEQ ID NO: 36445 - RNA, 20 nt, Artificial Sequence
  GATA2 Guide RNA
cuccugguugcuccagaacg

SEQ ID NO: 36446 - RNA, 20 nt, Artificial Sequence
  GATA2 Guide RNA
cuccuucguuuccaucccuc

SEQ ID NO: 36447 - RNA, 20 nt, Artificial Sequence
  GATA2 Guide RNA
cucggcuggcugcuuuccug

SEQ ID NO: 36448 - RNA, 20 nt, Artificial Sequence
  GATA2 Guide RNA
cucgggagggaguccagggc

SEQ ID NO: 36449 - RNA, 20 nt, Artificial Sequence
  GATA2 Guide RNA
cucucaggcacacgguuggc

SEQ ID NO: 36450 - RNA, 20 nt, Artificial Sequence
  GATA2 Guide RNA
cucuuccugcccaggcuguu

SEQ ID NO: 36451 - RNA, 20 nt, Artificial Sequence
  GATA2 Guide RNA
cugagaggcaccggcacugc

SEQ ID NO: 36452 - RNA, 20 nt, Artificial Sequence
  GATA2 Guide RNA
cugcaacagccugggcagga

SEQ ID NO: 36453 - RNA, 20 nt, Artificial Sequence
  GATA2 Guide RNA
cugcccaggcuguugcagcc

SEQ ID NO: 36454 - RNA, 20 nt, Artificial Sequence
  GATA2 Guide RNA
cugcccuggacucccucccg

SEQ ID NO: 36455 - RNA, 20 nt, Artificial Sequence
  GATA2 Guide RNA
cugcucggcuggcugcuuuc

SEQ ID NO: 36456 - RNA, 20 nt, Artificial Sequence
  GATA2 Guide RNA
cugcuuaaccggcaaguucu

SEQ ID NO: 36457 - RNA, 20 nt, Artificial Sequence
  GATA2 Guide RNA
cugcuuccaauccucaccag

SEQ ID NO: 36458 - RNA, 20 nt, Artificial Sequence
  GATA2 Guide RNA
cugcuuuccugcccuggacu

SEQ ID NO: 36459 - RNA, 20 nt, Artificial Sequence
  GATA2 Guide RNA
cuggacucccucccgagaac

SEQ ID NO: 36460 - RNA, 20 nt, Artificial Sequence
  GATA2 Guide RNA
cuggagcaaccaggagggua

SEQ ID NO: 36461 - RNA, 20 nt, Artificial Sequence
  GATA2 Guide RNA
cuggcugcaacagccugggc

SEQ ID NO: 36462 - RNA, 20 nt, Artificial Sequence
  GATA2 Guide RNA
cuggcugcuuuccugcccug

SEQ ID NO: 36463 - RNA, 20 nt, Artificial Sequence
  GATA2 Guide RNA
cugggccccuccuccccucc

SEQ ID NO: 36464 - RNA, 20 nt, Artificial Sequence
  GATA2 Guide RNA
cugggccuggcugcaacagc

SEQ ID NO: 36465 - RNA, 20 nt, Artificial Sequence
  GATA2 Guide RNA
cuggugaggauuggaagcag

SEQ ID NO: 36466 - RNA, 20 nt, Artificial Sequence
  GATA2 Guide RNA
cugguugcuccagaacgccu

SEQ ID NO: 36467 - RNA, 20 nt, Artificial Sequence
  GATA2 Guide RNA
cuguugcagccaggcccagg

SEQ ID NO: 36468 - RNA, 20 nt, Artificial Sequence
  GATA2 Guide RNA
cuuaaccggcaaguucucgg

SEQ ID NO: 36469 - RNA, 20 nt, Artificial Sequence
  GATA2 Guide RNA
cuuccaauccucaccaggag

SEQ ID NO: 36470 - RNA, 20 nt, Artificial Sequence
  GATA2 Guide RNA
cuuccugcccaggcuguugc

SEQ ID NO: 36471 - RNA, 20 nt, Artificial Sequence
  GATA2 Guide RNA
cuucguuuccaucccuccug

SEQ ID NO: 36472 - RNA, 20 nt, Artificial Sequence
  GATA2 Guide RNA
cuugccgguuaagcaggccc

SEQ ID NO: 36473 - RNA, 20 nt, Artificial Sequence
  GATA2 Guide RNA
cuuuccugcccuggacuccc

SEQ ID NO: 36474 - RNA, 20 nt, Artificial Sequence
  GATA2 Guide RNA
gaaacgaaggaggaggggag

SEQ ID NO: 36475 - RNA, 20 nt, Artificial Sequence
  GATA2 Guide RNA
gaaagcagccagccgagcag

SEQ ID NO: 36476 - RNA, 20 nt, Artificial Sequence
  GATA2 Guide RNA
gaacgccuggggcccugggc

SEQ ID NO: 36477 - RNA, 20 nt, Artificial Sequence
  GATA2 Guide RNA
gaacuugccgguuaagcagg

SEQ ID NO: 36478 - RNA, 20 nt, Artificial Sequence
  GATA2 Guide RNA
gaagcaggggauuuggcuuu

SEQ ID NO: 36479 - RNA, 20 nt, Artificial Sequence
  GATA2 Guide RNA
gaaggaggaggggaggaggg

SEQ ID NO: 36480 - RNA, 20 nt, Artificial Sequence
  GATA2 Guide RNA
gacacgggggccugcuuaac

SEQ ID NO: 36481 - RNA, 20 nt, Artificial Sequence
  GATA2 Guide RNA
gacucccucccgagaacuug

SEQ ID NO: 36482 - RNA, 20 nt, Artificial Sequence
  GATA2 Guide RNA
gagaacuugccgguuaagca

SEQ ID NO: 36483 - RNA, 20 nt, Artificial Sequence
  GATA2 Guide RNA
gagaggcaccggcacugcuc

SEQ ID NO: 36484 - RNA, 20 nt, Artificial Sequence
  GATA2 Guide RNA
gagcaaccaggaggguauuu

SEQ ID NO: 36485 - RNA, 20 nt, Artificial Sequence
  GATA2 Guide RNA
gagcagugccggugccucuc

SEQ ID NO: 36486 - RNA, 20 nt, Artificial Sequence
  GATA2 Guide RNA
gaggaggggaggaggggccc

SEQ ID NO: 36487 - RNA, 20 nt, Artificial Sequence
  GATA2 Guide RNA
gaggauuggaagcaggggau

SEQ ID NO: 36488 - RNA, 20 nt, Artificial Sequence
  GATA2 Guide RNA
gaggcaccggcacugcucgg

SEQ ID NO: 36489 - RNA, 20 nt, Artificial Sequence
  GATA2 Guide RNA
gagggaguccagggcaggaa

SEQ ID NO: 36490 - RNA, 20 nt, Artificial Sequence
  GATA2 Guide RNA
gagggauggaaacgaaggag

SEQ ID NO: 36491 - RNA, 20 nt, Artificial Sequence
  GATA2 Guide RNA
gaggggaggaggggcccagg

SEQ ID NO: 36492 - RNA, 20 nt, Artificial Sequence
  GATA2 Guide RNA
gagggucucccacaugggag

SEQ ID NO: 36493 - RNA, 20 nt, Artificial Sequence
  GATA2 Guide RNA
gaguccagggcaggaaagca

SEQ ID NO: 36494 - RNA, 20 nt, Artificial Sequence
  GATA2 Guide RNA
gagucguuuaaagccaaauc

SEQ ID NO: 36495 - RNA, 20 nt, Artificial Sequence
  GATA2 Guide RNA
gauggaaacgaaggaggagg

SEQ ID NO: 36496 - RNA, 20 nt, Artificial Sequence
  GATA2 Guide RNA
gauuggaagcaggggauuug

SEQ ID NO: 36497 - RNA, 20 nt, Artificial Sequence
  GATA2 Guide RNA
gauuuggcuuuaaacgacuc

SEQ ID NO: 36498 - RNA, 20 nt, Artificial Sequence
  GATA2 Guide RNA
gcaacagccugggcaggaag

SEQ ID NO: 36499 - RNA, 20 nt, Artificial Sequence
  GATA2 Guide RNA
gcaaccaggaggguauuuac

SEQ ID NO: 36500 - RNA, 20 nt, Artificial Sequence
  GATA2 Guide RNA
gcaaguucucgggagggagu

SEQ ID NO: 36501 - RNA, 20 nt, Artificial Sequence
  GATA2 Guide RNA
gcacacgguuggccugggcc

SEQ ID NO: 36502 - RNA, 20 nt, Artificial Sequence
  GATA2 Guide RNA
gcaccggcacugcucggcug

SEQ ID NO: 36503 - RNA, 20 nt, Artificial Sequence
  GATA2 Guide RNA
gcacugcucggcuggcugcu

SEQ ID NO: 36504 - RNA, 20 nt, Artificial Sequence
  GATA2 Guide RNA
gcagccagccgagcagugcc

SEQ ID NO: 36505 - RNA, 20 nt, Artificial Sequence
  GATA2 Guide RNA
gcagccaggcccaggccaac

SEQ ID NO: 36506 - RNA, 20 nt, Artificial Sequence
  GATA2 Guide RNA
gcaggaaagcagccagccga

SEQ ID NO: 36507 - RNA, 20 nt, Artificial Sequence
  GATA2 Guide RNA
gcaggggauuuggcuuuaaa

SEQ ID NO: 36508 - RNA, 20 nt, Artificial Sequence
  GATA2 Guide RNA
gcaguaaauacccuccuggu

SEQ ID NO: 36509 - RNA, 20 nt, Artificial Sequence
  GATA2 Guide RNA
gcagugccggugccucucag

SEQ ID NO: 36510 - RNA, 20 nt, Artificial Sequence
  GATA2 Guide RNA
gccaaauccccugcuuccaa

SEQ ID NO: 36511 - RNA, 20 nt, Artificial Sequence
  GATA2 Guide RNA
gccaaccgugugccugagag

SEQ ID NO: 36512 - RNA, 20 nt, Artificial Sequence
  GATA2 Guide RNA
gccagccgagcagugccggu

SEQ ID NO: 36513 - RNA, 20 nt, Artificial Sequence
  GATA2 Guide RNA
gccaggcccaggccaaccgu

SEQ ID NO: 36514 - RNA, 20 nt, Artificial Sequence
  GATA2 Guide RNA
gcccaggccaaccgugugcc

SEQ ID NO: 36515 - RNA, 20 nt, Artificial Sequence
  GATA2 Guide RNA
gcccaggcuguugcagccag

SEQ ID NO: 36516 - RNA, 20 nt, Artificial Sequence
  GATA2 Guide RNA
gcccagggccccaggcguuc

SEQ ID NO: 36517 - RNA, 20 nt, Artificial Sequence
  GATA2 Guide RNA
gccccaggcguucuggagca

SEQ ID NO: 36518 - RNA, 20 nt, Artificial Sequence
  GATA2 Guide RNA
gcccccucccaugugggaga

SEQ ID NO: 36519 - RNA, 20 nt, Artificial Sequence
  GATA2 Guide RNA
gccccuccuccccuccuccu

SEQ ID NO: 36520 - RNA, 20 nt, Artificial Sequence
  GATA2 Guide RNA
gcccuggacucccucccgag

SEQ ID NO: 36521 - RNA, 20 nt, Artificial Sequence
  GATA2 Guide RNA
gccgagcagugccggugccu

SEQ ID NO: 36522 - RNA, 20 nt, Artificial Sequence
  GATA2 Guide RNA
gccggugccucucaggcaca

SEQ ID NO: 36523 - RNA, 20 nt, Artificial Sequence
  GATA2 Guide RNA
gccgguuaagcaggcccccg

SEQ ID NO: 36524 - RNA, 20 nt, Artificial Sequence
  GATA2 Guide RNA
gccucucaggcacacgguug

SEQ ID NO: 36525 - RNA, 20 nt, Artificial Sequence
  GATA2 Guide RNA
gccugagaggcaccggcacu

SEQ ID NO: 36526 - RNA, 20 nt, Artificial Sequence
  GATA2 Guide RNA
gccugcuuaaccggcaaguu

SEQ ID NO: 36527 - RNA, 20 nt, Artificial Sequence
  GATA2 Guide RNA
gccuggcugcaacagccugg

SEQ ID NO: 36528 - RNA, 20 nt, Artificial Sequence
  GATA2 Guide RNA
gccugggccuggcugcaaca

SEQ ID NO: 36529 - RNA, 20 nt, Artificial Sequence
  GATA2 Guide RNA
gcguucuggagcaaccagga

SEQ ID NO: 36530 - RNA, 20 nt, Artificial Sequence
  GATA2 Guide RNA
gcuccagaacgccuggggcc

SEQ ID NO: 36531 - RNA, 20 nt, Artificial Sequence
  GATA2 Guide RNA
gcucggcuggcugcuuuccu

SEQ ID NO: 36532 - RNA, 20 nt, Artificial Sequence
  GATA2 Guide RNA
gcugcaacagccugggcagg

SEQ ID NO: 36533 - RNA, 20 nt, Artificial Sequence
  GATA2 Guide RNA
gcugcuuuccugcccuggac

SEQ ID NO: 36534 - RNA, 20 nt, Artificial Sequence
  GATA2 Guide RNA
gcuggcugcuuuccugcccu

SEQ ID NO: 36535 - RNA, 20 nt, Artificial Sequence
  GATA2 Guide RNA
gcuguugcagccaggcccag

SEQ ID NO: 36536 - RNA, 20 nt, Artificial Sequence
  GATA2 Guide RNA
gcuuaaccggcaaguucucg

SEQ ID NO: 36537 - RNA, 20 nt, Artificial Sequence
  GATA2 Guide RNA
gcuuccaauccucaccagga

SEQ ID NO: 36538 - RNA, 20 nt, Artificial Sequence
  GATA2 Guide RNA
gcuuuccugcccuggacucc

SEQ ID NO: 36539 - RNA, 20 nt, Artificial Sequence
  GATA2 Guide RNA
ggaaacgaaggaggagggga

SEQ ID NO: 36540 - RNA, 20 nt, Artificial Sequence
  GATA2 Guide RNA
ggaaagcagccagccgagca

SEQ ID NO: 36541 - RNA, 20 nt, Artificial Sequence
  GATA2 Guide RNA
ggaagcaggggauuuggcuu

SEQ ID NO: 36542 - RNA, 20 nt, Artificial Sequence
  GATA2 Guide RNA
ggacucccucccgagaacuu

SEQ ID NO: 36543 - RNA, 20 nt, Artificial Sequence
  GATA2 Guide RNA
ggagcaaccaggaggguauu

SEQ ID NO: 36544 - RNA, 20 nt, Artificial Sequence
  GATA2 Guide RNA
ggaggaggggaggaggggcc

SEQ ID NO: 36545 - RNA, 20 nt, Artificial Sequence
  GATA2 Guide RNA
ggagggaguccagggcagga

SEQ ID NO: 36546 - RNA, 20 nt, Artificial Sequence
  GATA2 Guide RNA
ggagggauggaaacgaagga

SEQ ID NO: 36547 - RNA, 20 nt, Artificial Sequence
  GATA2 Guide RNA
ggaggggaggaggggcccag

SEQ ID NO: 36548 - RNA, 20 nt, Artificial Sequence
  GATA2 Guide RNA
ggaggguauuuacugcaaac

SEQ ID NO: 36549 - RNA, 20 nt, Artificial Sequence
  GATA2 Guide RNA
ggaguccagggcaggaaagc

SEQ ID NO: 36550 - RNA, 20 nt, Artificial Sequence
  GATA2 Guide RNA
ggauggaaacgaaggaggag

SEQ ID NO: 36551 - RNA, 20 nt, Artificial Sequence
  GATA2 Guide RNA
ggauuggaagcaggggauuu

SEQ ID NO: 36552 - RNA, 20 nt, Artificial Sequence
  GATA2 Guide RNA
ggauuuggcuuuaaacgacu

SEQ ID NO: 36553 - RNA, 20 nt, Artificial Sequence
  GATA2 Guide RNA
ggcaaguucucgggagggag

SEQ ID NO: 36554 - RNA, 20 nt, Artificial Sequence
  GATA2 Guide RNA
ggcacacgguuggccugggc

SEQ ID NO: 36555 - RNA, 20 nt, Artificial Sequence
  GATA2 Guide RNA
ggcaccggcacugcucggcu

SEQ ID NO: 36556 - RNA, 20 nt, Artificial Sequence
  GATA2 Guide RNA
ggcacugcucggcuggcugc

SEQ ID NO: 36557 - RNA, 20 nt, Artificial Sequence
  GATA2 Guide RNA
ggcaggaaagcagccagccg

SEQ ID NO: 36558 - RNA, 20 nt, Artificial Sequence
  GATA2 Guide RNA
ggccaaccgugugccugaga

SEQ ID NO: 36559 - RNA, 20 nt, Artificial Sequence
  GATA2 Guide RNA
ggcccaggccaaccgugugc

SEQ ID NO: 36560 - RNA, 20 nt, Artificial Sequence
  GATA2 Guide RNA
ggcccagggccccaggcguu

SEQ ID NO: 36561 - RNA, 20 nt, Artificial Sequence
  GATA2 Guide RNA
ggccccaggcguucuggagc

SEQ ID NO: 36562 - RNA, 20 nt, Artificial Sequence
  GATA2 Guide RNA
ggccccuccuccccuccucc

SEQ ID NO: 36563 - RNA, 20 nt, Artificial Sequence
  GATA2 Guide RNA
ggccugcuuaaccggcaagu

SEQ ID NO: 36564 - RNA, 20 nt, Artificial Sequence
  GATA2 Guide RNA
ggccuggcugcaacagccug

SEQ ID NO: 36565 - RNA, 20 nt, Artificial Sequence
  GATA2 Guide RNA
ggccugggccuggcugcaac

SEQ ID NO: 36566 - RNA, 20 nt, Artificial Sequence
  GATA2 Guide RNA
ggcguucuggagcaaccagg

SEQ ID NO: 36567 - RNA, 20 nt, Artificial Sequence
  GATA2 Guide RNA
ggcugcaacagccugggcag

SEQ ID NO: 36568 - RNA, 20 nt, Artificial Sequence
  GATA2 Guide RNA
ggcugcuuuccugcccugga

SEQ ID NO: 36569 - RNA, 20 nt, Artificial Sequence
  GATA2 Guide RNA
ggcuggcugcuuuccugccc

SEQ ID NO: 36570 - RNA, 20 nt, Artificial Sequence
  GATA2 Guide RNA
ggcuguugcagccaggccca

SEQ ID NO: 36571 - RNA, 20 nt, Artificial Sequence
  GATA2 Guide RNA
gggagggaguccagggcagg

SEQ ID NO: 36572 - RNA, 20 nt, Artificial Sequence
  GATA2 Guide RNA
gggaguccagggcaggaaag

SEQ ID NO: 36573 - RNA, 20 nt, Artificial Sequence
  GATA2 Guide RNA
gggauggaaacgaaggagga

SEQ ID NO: 36574 - RNA, 20 nt, Artificial Sequence
  GATA2 Guide RNA
gggauuuggcuuuaaacgac

SEQ ID NO: 36575 - RNA, 20 nt, Artificial Sequence
  GATA2 Guide RNA
gggcaggaaagcagccagcc

SEQ ID NO: 36576 - RNA, 20 nt, Artificial Sequence
  GATA2 Guide RNA
gggccccaggcguucuggag

SEQ ID NO: 36577 - RNA, 20 nt, Artificial Sequence
  GATA2 Guide RNA
gggccccuccuccccuccuc

SEQ ID NO: 36578 - RNA, 20 nt, Artificial Sequence
  GATA2 Guide RNA
gggccugcuuaaccggcaag

SEQ ID NO: 36579 - RNA, 20 nt, Artificial Sequence
  GATA2 Guide RNA
gggccuggcugcaacagccu

SEQ ID NO: 36580 - RNA, 20 nt, Artificial Sequence
  GATA2 Guide RNA
ggggauuuggcuuuaaacga

SEQ ID NO: 36581 - RNA, 20 nt, Artificial Sequence
  GATA2 Guide RNA
ggggccugcuuaaccggcaa

SEQ ID NO: 36582 - RNA, 20 nt, Artificial Sequence
  GATA2 Guide RNA
gggggccugcuuaaccggca

SEQ ID NO: 36583 - RNA, 20 nt, Artificial Sequence
  GATA2 Guide RNA
gggucucccacaugggaggg

SEQ ID NO: 36584 - RNA, 20 nt, Artificial Sequence
  GATA2 Guide RNA
gguccagagucguuuaaagc

SEQ ID NO: 36585 - RNA, 20 nt, Artificial Sequence
  GATA2 Guide RNA
ggucucccacaugggagggg

SEQ ID NO: 36586 - RNA, 20 nt, Artificial Sequence
  GATA2 Guide RNA
ggugaggauuggaagcaggg

SEQ ID NO: 36587 - RNA, 20 nt, Artificial Sequence
  GATA2 Guide RNA
ggugccucucaggcacacgg

SEQ ID NO: 36588 - RNA, 20 nt, Artificial Sequence
  GATA2 Guide RNA
gguugcuccagaacgccugg

SEQ ID NO: 36589 - RNA, 20 nt, Artificial Sequence
  GATA2 Guide RNA
gguuggccugggccuggcug

SEQ ID NO: 36590 - RNA, 20 nt, Artificial Sequence
  GATA2 Guide RNA
guaaauacccuccugguugc

SEQ ID NO: 36591 - RNA, 20 nt, Artificial Sequence
  GATA2 Guide RNA
guccagagucguuuaaagcc

SEQ ID NO: 36592 - RNA, 20 nt, Artificial Sequence
  GATA2 Guide RNA
guccagggcaggaaagcagc

SEQ ID NO: 36593 - RNA, 20 nt, Artificial Sequence
  GATA2 Guide RNA
gucccucuuccugcccaggc

SEQ ID NO: 36594 - RNA, 20 nt, Artificial Sequence
  GATA2 Guide RNA
gucguuuaaagccaaauccc

SEQ ID NO: 36595 - RNA, 20 nt, Artificial Sequence
  GATA2 Guide RNA
gucucccacaugggaggggg

SEQ ID NO: 36596 - RNA, 20 nt, Artificial Sequence
  GATA2 Guide RNA
gugaggauuggaagcagggg

SEQ ID NO: 36597 - RNA, 20 nt, Artificial Sequence
  GATA2 Guide RNA
gugcccccucccauguggga

SEQ ID NO: 36598 - RNA, 20 nt, Artificial Sequence
  GATA2 Guide RNA
gugccggugccucucaggca

SEQ ID NO: 36599 - RNA, 20 nt, Artificial Sequence
  GATA2 Guide RNA
gugccucucaggcacacggu

SEQ ID NO: 36600 - RNA, 20 nt, Artificial Sequence
  GATA2 Guide RNA
gugccugagaggcaccggca

SEQ ID NO: 36601 - RNA, 20 nt, Artificial Sequence
  GATA2 Guide RNA
gugugccugagaggcaccgg

SEQ ID NO: 36602 - RNA, 20 nt, Artificial Sequence
  GATA2 Guide RNA
guucucgggagggaguccag

SEQ ID NO: 36603 - RNA, 20 nt, Artificial Sequence
  GATA2 Guide RNA
guucuggagcaaccaggagg

SEQ ID NO: 36604 - RNA, 20 nt, Artificial Sequence
  GATA2 Guide RNA
guugcagccaggcccaggcc

SEQ ID NO: 36605 - RNA, 20 nt, Artificial Sequence
  GATA2 Guide RNA
guugcuccagaacgccuggg

SEQ ID NO: 36606 - RNA, 20 nt, Artificial Sequence
  GATA2 Guide RNA
guuggccugggccuggcugc

SEQ ID NO: 36607 - RNA, 20 nt, Artificial Sequence
  GATA2 Guide RNA
guuuaaagccaaauccccug

SEQ ID NO: 36608 - RNA, 20 nt, Artificial Sequence
  GATA2 Guide RNA
guuuccaucccuccugguga

SEQ ID NO: 36609 - RNA, 20 nt, Artificial Sequence
  GATA2 Guide RNA
guuugcaguaaauacccucc

SEQ ID NO: 36610 - RNA, 20 nt, Artificial Sequence
  GATA2 Guide RNA
uaaagccaaauccccugcuu

SEQ ID NO: 36611 - RNA, 20 nt, Artificial Sequence
  GATA2 Guide RNA
uaaauacccuccugguugcu

SEQ ID NO: 36612 - RNA, 20 nt, Artificial Sequence
  GATA2 Guide RNA
uaaccggcaaguucucggga

SEQ ID NO: 36613 - RNA, 20 nt, Artificial Sequence
  GATA2 Guide RNA
uacccuccugguugcuccag

SEQ ID NO: 36614 - RNA, 20 nt, Artificial Sequence
  GATA2 Guide RNA
ucaccaggagggauggaaac

SEQ ID NO: 36615 - RNA, 20 nt, Artificial Sequence
  GATA2 Guide RNA
ucaggcacacgguuggccug

SEQ ID NO: 36616 - RNA, 20 nt, Artificial Sequence
  GATA2 Guide RNA
uccaauccucaccaggaggg

SEQ ID NO: 36617 - RNA, 20 nt, Artificial Sequence
  GATA2 Guide RNA
uccagaacgccuggggcccu

SEQ ID NO: 36618 - RNA, 20 nt, Artificial Sequence
  GATA2 Guide RNA
uccagagucguuuaaagcca

SEQ ID NO: 36619 - RNA, 20 nt, Artificial Sequence
  GATA2 Guide RNA
uccagggcaggaaagcagcc

SEQ ID NO: 36620 - RNA, 20 nt, Artificial Sequence
  GATA2 Guide RNA
uccaucccuccuggugagga

SEQ ID NO: 36621 - RNA, 20 nt, Artificial Sequence
  GATA2 Guide RNA
uccccuccuccuucguuucc

SEQ ID NO: 36622 - RNA, 20 nt, Artificial Sequence
  GATA2 Guide RNA
uccccugcuuccaauccuca

SEQ ID NO: 36623 - RNA, 20 nt, Artificial Sequence
  GATA2 Guide RNA
ucccgagaacuugccgguua

SEQ ID NO: 36624 - RNA, 20 nt, Artificial Sequence
  GATA2 Guide RNA
ucccucccgagaacuugccg

SEQ ID NO: 36625 - RNA, 20 nt, Artificial Sequence
  GATA2 Guide RNA
ucccuccuggugaggauugg

SEQ ID NO: 36626 - RNA, 20 nt, Artificial Sequence
  GATA2 Guide RNA
ucccucuuccugcccaggcu

SEQ ID NO: 36627 - RNA, 20 nt, Artificial Sequence
  GATA2 Guide RNA
uccucaccaggagggaugga

SEQ ID NO: 36628 - RNA, 20 nt, Artificial Sequence
  GATA2 Guide RNA
uccuccccuccuccuucguu

SEQ ID NO: 36629 - RNA, 20 nt, Artificial Sequence
  GATA2 Guide RNA
uccuccuucguuuccauccc

SEQ ID NO: 36630 - RNA, 20 nt, Artificial Sequence
  GATA2 Guide RNA
uccugcccaggcuguugcag

SEQ ID NO: 36631 - RNA, 20 nt, Artificial Sequence
  GATA2 Guide RNA
uccugcccuggacucccucc

SEQ ID NO: 36632 - RNA, 20 nt, Artificial Sequence
  GATA2 Guide RNA
uccuggugaggauuggaagc

SEQ ID NO: 36633 - RNA, 20 nt, Artificial Sequence
  GATA2 Guide RNA
uccugguugcuccagaacgc

SEQ ID NO: 36634 - RNA, 20 nt, Artificial Sequence
  GATA2 Guide RNA
uccuucguuuccaucccucc

SEQ ID NO: 36635 - RNA, 20 nt, Artificial Sequence
  GATA2 Guide RNA
ucggcuggcugcuuuccugc

SEQ ID NO: 36636 - RNA, 20 nt, Artificial Sequence
  GATA2 Guide RNA
ucgggagggaguccagggca

SEQ ID NO: 36637 - RNA, 20 nt, Artificial Sequence
  GATA2 Guide RNA
ucguuuaaagccaaaucccc

SEQ ID NO: 36638 - RNA, 20 nt, Artificial Sequence
  GATA2 Guide RNA
ucguuuccaucccuccuggu

SEQ ID NO: 36639 - RNA, 20 nt, Artificial Sequence
  GATA2 Guide RNA
ucucaggcacacgguuggcc

SEQ ID NO: 36640 - RNA, 20 nt, Artificial Sequence
  GATA2 Guide RNA
ucucgggagggaguccaggg

SEQ ID NO: 36641 - RNA, 20 nt, Artificial Sequence
  GATA2 Guide RNA
ucuggagcaaccaggagggu

SEQ ID NO: 36642 - RNA, 20 nt, Artificial Sequence
  GATA2 Guide RNA
ucuuccugcccaggcuguug

SEQ ID NO: 36643 - RNA, 20 nt, Artificial Sequence
  GATA2 Guide RNA
ugagaggcaccggcacugcu

SEQ ID NO: 36644 - RNA, 20 nt, Artificial Sequence
  GATA2 Guide RNA
ugaggauuggaagcagggga

SEQ ID NO: 36645 - RNA, 20 nt, Artificial Sequence
  GATA2 Guide RNA
ugcaacagccugggcaggaa

SEQ ID NO: 36646 - RNA, 20 nt, Artificial Sequence
  GATA2 Guide RNA
ugcagccaggcccaggccaa

SEQ ID NO: 36647 - RNA, 20 nt, Artificial Sequence
  GATA2 Guide RNA
ugcaguaaauacccuccugg

SEQ ID NO: 36648 - RNA, 20 nt, Artificial Sequence
  GATA2 Guide RNA
ugcccaggcuguugcagcca

SEQ ID NO: 36649 - RNA, 20 nt, Artificial Sequence
  GATA2 Guide RNA
ugcccccucccaugugggag

SEQ ID NO: 36650 - RNA, 20 nt, Artificial Sequence
  GATA2 Guide RNA
ugcccuggacucccucccga

SEQ ID NO: 36651 - RNA, 20 nt, Artificial Sequence
  GATA2 Guide RNA
ugccggugccucucaggcac

SEQ ID NO: 36652 - RNA, 20 nt, Artificial Sequence
  GATA2 Guide RNA
ugccgguuaagcaggccccc

SEQ ID NO: 36653 - RNA, 20 nt, Artificial Sequence
  GATA2 Guide RNA
ugccucucaggcacacgguu

SEQ ID NO: 36654 - RNA, 20 nt, Artificial Sequence
  GATA2 Guide RNA
ugccugagaggcaccggcac

SEQ ID NO: 36655 - RNA, 20 nt, Artificial Sequence
  GATA2 Guide RNA
ugcuccagaacgccuggggc

SEQ ID NO: 36656 - RNA, 20 nt, Artificial Sequence
  GATA2 Guide RNA
ugcucggcuggcugcuuucc

SEQ ID NO: 36657 - RNA, 20 nt, Artificial Sequence
  GATA2 Guide RNA
ugcuuaaccggcaaguucuc

SEQ ID NO: 36658 - RNA, 20 nt, Artificial Sequence
  GATA2 Guide RNA
ugcuuccaauccucaccagg

SEQ ID NO: 36659 - RNA, 20 nt, Artificial Sequence
  GATA2 Guide RNA
ugcuuuccugcccuggacuc

SEQ ID NO: 36660 - RNA, 20 nt, Artificial Sequence
  GATA2 Guide RNA
uggaaacgaaggaggagggg

SEQ ID NO: 36661 - RNA, 20 nt, Artificial Sequence
  GATA2 Guide RNA
uggaagcaggggauuuggcu

SEQ ID NO: 36662 - RNA, 20 nt, Artificial Sequence
  GATA2 Guide RNA
uggacucccucccgagaacu

SEQ ID NO: 36663 - RNA, 20 nt, Artificial Sequence
  GATA2 Guide RNA
uggagcaaccaggaggguau

SEQ ID NO: 36664 - RNA, 20 nt, Artificial Sequence
  GATA2 Guide RNA
uggccugggccuggcugcaa

SEQ ID NO: 36665 - RNA, 20 nt, Artificial Sequence
  GATA2 Guide RNA
uggcugcaacagccugggca

SEQ ID NO: 36666 - RNA, 20 nt, Artificial Sequence
  GATA2 Guide RNA
uggcugcuuuccugcccugg

SEQ ID NO: 36667 - RNA, 20 nt, Artificial Sequence
  GATA2 Guide RNA
ugggccccuccuccccuccu

SEQ ID NO: 36668 - RNA, 20 nt, Artificial Sequence
  GATA2 Guide RNA
ugggccuggcugcaacagcc

SEQ ID NO: 36669 - RNA, 20 nt, Artificial Sequence
  GATA2 Guide RNA
uggggcccugggccccuccu

SEQ ID NO: 36670 - RNA, 20 nt, Artificial Sequence
  GATA2 Guide RNA
uggugaggauuggaagcagg

SEQ ID NO: 36671 - RNA, 20 nt, Artificial Sequence
  GATA2 Guide RNA
ugguugcuccagaacgccug

SEQ ID NO: 36672 - RNA, 20 nt, Artificial Sequence
  GATA2 Guide RNA
ugugcccccucccauguggg

SEQ ID NO: 36673 - RNA, 20 nt, Artificial Sequence
  GATA2 Guide RNA
ugugccugagaggcaccggc

SEQ ID NO: 36674 - RNA, 20 nt, Artificial Sequence
  GATA2 Guide RNA
uguugcagccaggcccaggc

SEQ ID NO: 36675 - RNA, 20 nt, Artificial Sequence
  GATA2 Guide RNA
uuaaagccaaauccccugcu

SEQ ID NO: 36676 - RNA, 20 nt, Artificial Sequence
  GATA2 Guide RNA
uuaaccggcaaguucucggg

SEQ ID NO: 36677 - RNA, 20 nt, Artificial Sequence
  GATA2 Guide RNA
uuccaauccucaccaggagg

SEQ ID NO: 36678 - RNA, 20 nt, Artificial Sequence
  GATA2 Guide RNA
uuccaucccuccuggugagg

SEQ ID NO: 36679 - RNA, 20 nt, Artificial Sequence
  GATA2 Guide RNA
uuccugcccaggcuguugca

SEQ ID NO: 36680 - RNA, 20 nt, Artificial Sequence
  GATA2 Guide RNA
uuccugcccuggacucccuc

SEQ ID NO: 36681 - RNA, 20 nt, Artificial Sequence
  GATA2 Guide RNA
uucguuuccaucccuccugg

SEQ ID NO: 36682 - RNA, 20 nt, Artificial Sequence
  GATA2 Guide RNA
uucucgggagggaguccagg

SEQ ID NO: 36683 - RNA, 20 nt, Artificial Sequence
  GATA2 Guide RNA
uucuggagcaaccaggaggg

SEQ ID NO: 36684 - RNA, 20 nt, Artificial Sequence
  GATA2 Guide RNA
uugcagccaggcccaggcca

SEQ ID NO: 36685 - RNA, 20 nt, Artificial Sequence
  GATA2 Guide RNA
uugcaguaaauacccuccug

SEQ ID NO: 36686 - RNA, 20 nt, Artificial Sequence
  GATA2 Guide RNA
uugccgguuaagcaggcccc

SEQ ID NO: 36687 - RNA, 20 nt, Artificial Sequence
  GATA2 Guide RNA
uugcuccagaacgccugggg

SEQ ID NO: 36688 - RNA, 20 nt, Artificial Sequence
  GATA2 Guide RNA
uuggaagcaggggauuuggc

SEQ ID NO: 36689 - RNA, 20 nt, Artificial Sequence
  GATA2 Guide RNA
uuggccugggccuggcugca

SEQ ID NO: 36690 - RNA, 20 nt, Artificial Sequence
  GATA2 Guide RNA
uuuaaagccaaauccccugc

SEQ ID NO: 36691 - RNA, 20 nt, Artificial Sequence
  GATA2 Guide RNA
uuuccaucccuccuggugag

SEQ ID NO: 36692 - RNA, 20 nt, Artificial Sequence
  GATA2 Guide RNA
uuuccugcccuggacucccu

SEQ ID NO: 36693 - RNA, 20 nt, Artificial Sequence
  GATA2 Guide RNA
uuugcaguaaauacccuccu

SEQ ID NO: 36694 - RNA, 20 nt, Artificial Sequence
  GATA2 Guide RNA
uuuggcuuuaaacgacucug

SEQ ID NO: 36695 - RNA, 21 nt, Artificial Sequence
  GATA2 Guide RNA
aaacgaaggaggaggggagga

SEQ ID NO: 36696 - RNA, 21 nt, Artificial Sequence
  GATA2 Guide RNA
aaagcagccagccgagcagug

SEQ ID NO: 36697 - RNA, 21 nt, Artificial Sequence
  GATA2 Guide RNA
aaagccaaauccccugcuucc

SEQ ID NO: 36698 - RNA, 21 nt, Artificial Sequence
  GATA2 Guide RNA
aaaguuugcaguaaauacccu

SEQ ID NO: 36699 - RNA, 21 nt, Artificial Sequence
  GATA2 Guide RNA
aaauacccuccugguugcucc

SEQ ID NO: 36700 - RNA, 21 nt, Artificial Sequence
  GATA2 Guide RNA
aaauccccugcuuccaauccu

SEQ ID NO: 36701 - RNA, 21 nt, Artificial Sequence
  GATA2 Guide RNA
aacagccugggcaggaagagg

SEQ ID NO: 36702 - RNA, 21 nt, Artificial Sequence
  GATA2 Guide RNA
aaccaggaggguauuuacugc

SEQ ID NO: 36703 - RNA, 21 nt, Artificial Sequence
  GATA2 Guide RNA
aaccggcaaguucucgggagg

SEQ ID NO: 36704 - RNA, 21 nt, Artificial Sequence
  GATA2 Guide RNA
aaccgugugccugagaggcac

SEQ ID NO: 36705 - RNA, 21 nt, Artificial Sequence
  GATA2 Guide RNA
aacgaaggaggaggggaggag

SEQ ID NO: 36706 - RNA, 21 nt, Artificial Sequence
  GATA2 Guide RNA
aacuugccgguuaagcaggcc

SEQ ID NO: 36707 - RNA, 21 nt, Artificial Sequence
  GATA2 Guide RNA
aagcagccagccgagcagugc

SEQ ID NO: 36708 - RNA, 21 nt, Artificial Sequence
  GATA2 Guide RNA
aagcaggggauuuggcuuuaa

SEQ ID NO: 36709 - RNA, 21 nt, Artificial Sequence
  GATA2 Guide RNA
aagccaaauccccugcuucca

SEQ ID NO: 36710 - RNA, 21 nt, Artificial Sequence
  GATA2 Guide RNA
aaggaggaggggaggaggggc

SEQ ID NO: 36711 - RNA, 21 nt, Artificial Sequence
  GATA2 Guide RNA
aaguucucgggagggagucca

SEQ ID NO: 36712 - RNA, 21 nt, Artificial Sequence
  GATA2 Guide RNA
aaguuugcaguaaauacccuc

SEQ ID NO: 36713 - RNA, 21 nt, Artificial Sequence
  GATA2 Guide RNA
aauacccuccugguugcucca

SEQ ID NO: 36714 - RNA, 21 nt, Artificial Sequence
  GATA2 Guide RNA
aauccccugcuuccaauccuc

SEQ ID NO: 36715 - RNA, 21 nt, Artificial Sequence
  GATA2 Guide RNA
aauccucaccaggagggaugg

SEQ ID NO: 36716 - RNA, 21 nt, Artificial Sequence
  GATA2 Guide RNA
acacgggggccugcuuaaccg

SEQ ID NO: 36717 - RNA, 21 nt, Artificial Sequence
  GATA2 Guide RNA
acacgguuggccugggccugg

SEQ ID NO: 36718 - RNA, 21 nt, Artificial Sequence
  GATA2 Guide RNA
accaggagggauggaaacgaa

SEQ ID NO: 36719 - RNA, 21 nt, Artificial Sequence
  GATA2 Guide RNA
accaggaggguauuuacugca

SEQ ID NO: 36720 - RNA, 21 nt, Artificial Sequence
  GATA2 Guide RNA
acccuccugguugcuccagaa

SEQ ID NO: 36721 - RNA, 21 nt, Artificial Sequence
  GATA2 Guide RNA
accggcaaguucucgggaggg

SEQ ID NO: 36722 - RNA, 21 nt, Artificial Sequence
  GATA2 Guide RNA
accggcacugcucggcuggcu

SEQ ID NO: 36723 - RNA, 21 nt, Artificial Sequence
  GATA2 Guide RNA
accgugugccugagaggcacc

SEQ ID NO: 36724 - RNA, 21 nt, Artificial Sequence
  GATA2 Guide RNA
acgaaggaggaggggaggagg

SEQ ID NO: 36725 - RNA, 21 nt, Artificial Sequence
  GATA2 Guide RNA
acgggggccugcuuaaccggc

SEQ ID NO: 36726 - RNA, 21 nt, Artificial Sequence
  GATA2 Guide RNA
acgguuggccugggccuggcu

SEQ ID NO: 36727 - RNA, 21 nt, Artificial Sequence
  GATA2 Guide RNA
acucccucccgagaacuugcc

SEQ ID NO: 36728 - RNA, 21 nt, Artificial Sequence
  GATA2 Guide RNA
acugcucggcuggcugcuuuc

SEQ ID NO: 36729 - RNA, 21 nt, Artificial Sequence
  GATA2 Guide RNA
acuugccgguuaagcaggccc

SEQ ID NO: 36730 - RNA, 21 nt, Artificial Sequence
  GATA2 Guide RNA
agaacgccuggggcccugggc

SEQ ID NO: 36731 - RNA, 21 nt, Artificial Sequence
  GATA2 Guide RNA
agaacuugccgguuaagcagg

SEQ ID NO: 36732 - RNA, 21 nt, Artificial Sequence
  GATA2 Guide RNA
agacacgggggccugcuuaac

SEQ ID NO: 36733 - RNA, 21 nt, Artificial Sequence
  GATA2 Guide RNA
agaggcaccggcacugcucgg

SEQ ID NO: 36734 - RNA, 21 nt, Artificial Sequence
  GATA2 Guide RNA
agagggucucccacaugggag

SEQ ID NO: 36735 - RNA, 21 nt, Artificial Sequence
  GATA2 Guide RNA
agagucguuuaaagccaaauc

SEQ ID NO: 36736 - RNA, 21 nt, Artificial Sequence
  GATA2 Guide RNA
agcaaccaggaggguauuuac

SEQ ID NO: 36737 - RNA, 21 nt, Artificial Sequence
  GATA2 Guide RNA
agcagccagccgagcagugcc

SEQ ID NO: 36738 - RNA, 21 nt, Artificial Sequence
  GATA2 Guide RNA
agcaggggauuuggcuuuaaa

SEQ ID NO: 36739 - RNA, 21 nt, Artificial Sequence
  GATA2 Guide RNA
agcagugccggugccucucag

SEQ ID NO: 36740 - RNA, 21 nt, Artificial Sequence
  GATA2 Guide RNA
agccaaauccccugcuuccaa

SEQ ID NO: 36741 - RNA, 21 nt, Artificial Sequence
  GATA2 Guide RNA
agccagccgagcagugccggu

SEQ ID NO: 36742 - RNA, 21 nt, Artificial Sequence
  GATA2 Guide RNA
agccaggcccaggccaaccgu

SEQ ID NO: 36743 - RNA, 21 nt, Artificial Sequence
  GATA2 Guide RNA
agccgagcagugccggugccu

SEQ ID NO: 36744 - RNA, 21 nt, Artificial Sequence
  GATA2 Guide RNA
aggaaagcagccagccgagca

SEQ ID NO: 36745 - RNA, 21 nt, Artificial Sequence
  GATA2 Guide RNA
aggaggaggggaggaggggcc

SEQ ID NO: 36746 - RNA, 21 nt, Artificial Sequence
  GATA2 Guide RNA
aggagggauggaaacgaagga

SEQ ID NO: 36747 - RNA, 21 nt, Artificial Sequence
  GATA2 Guide RNA
aggaggggaggaggggcccag

SEQ ID NO: 36748 - RNA, 21 nt, Artificial Sequence
  GATA2 Guide RNA
aggaggguauuuacugcaaac

SEQ ID NO: 36749 - RNA, 21 nt, Artificial Sequence
  GATA2 Guide RNA
aggauuggaagcaggggauuu

SEQ ID NO: 36750 - RNA, 21 nt, Artificial Sequence
  GATA2 Guide RNA
aggcacacgguuggccugggc

SEQ ID NO: 36751 - RNA, 21 nt, Artificial Sequence
  GATA2 Guide RNA
aggcaccggcacugcucggcu

SEQ ID NO: 36752 - RNA, 21 nt, Artificial Sequence
  GATA2 Guide RNA
aggccaaccgugugccugaga

SEQ ID NO: 36753 - RNA, 21 nt, Artificial Sequence
  GATA2 Guide RNA
aggcccaggccaaccgugugc

SEQ ID NO: 36754 - RNA, 21 nt, Artificial Sequence
  GATA2 Guide RNA
aggcguucuggagcaaccagg

SEQ ID NO: 36755 - RNA, 21 nt, Artificial Sequence
  GATA2 Guide RNA
aggcuguugcagccaggccca

SEQ ID NO: 36756 - RNA, 21 nt, Artificial Sequence
  GATA2 Guide RNA
agggaguccagggcaggaaag

SEQ ID NO: 36757 - RNA, 21 nt, Artificial Sequence
  GATA2 Guide RNA
agggauggaaacgaaggagga

SEQ ID NO: 36758 - RNA, 21 nt, Artificial Sequence
  GATA2 Guide RNA
agggcaggaaagcagccagcc

SEQ ID NO: 36759 - RNA, 21 nt, Artificial Sequence
  GATA2 Guide RNA
agggccccaggcguucuggag

SEQ ID NO: 36760 - RNA, 21 nt, Artificial Sequence
  GATA2 Guide RNA
aggggauuuggcuuuaaacga

SEQ ID NO: 36761 - RNA, 21 nt, Artificial Sequence
  GATA2 Guide RNA
agggucucccacaugggaggg

SEQ ID NO: 36762 - RNA, 21 nt, Artificial Sequence
  GATA2 Guide RNA
aguaaauacccuccugguugc

SEQ ID NO: 36763 - RNA, 21 nt, Artificial Sequence
  GATA2 Guide RNA
aguccagggcaggaaagcagc

SEQ ID NO: 36764 - RNA, 21 nt, Artificial Sequence
  GATA2 Guide RNA
agucguuuaaagccaaauccc

SEQ ID NO: 36765 - RNA, 21 nt, Artificial Sequence
  GATA2 Guide RNA
agugccggugccucucaggca

SEQ ID NO: 36766 - RNA, 21 nt, Artificial Sequence
  GATA2 Guide RNA
aguucucgggagggaguccag

SEQ ID NO: 36767 - RNA, 21 nt, Artificial Sequence
  GATA2 Guide RNA
aguuugcaguaaauacccucc

SEQ ID NO: 36768 - RNA, 21 nt, Artificial Sequence
  GATA2 Guide RNA
auacccuccugguugcuccag

SEQ ID NO: 36769 - RNA, 21 nt, Artificial Sequence
  GATA2 Guide RNA
auccccugcuuccaauccuca

SEQ ID NO: 36770 - RNA, 21 nt, Artificial Sequence
  GATA2 Guide RNA
aucccuccuggugaggauugg

SEQ ID NO: 36771 - RNA, 21 nt, Artificial Sequence
  GATA2 Guide RNA
auccucaccaggagggaugga

SEQ ID NO: 36772 - RNA, 21 nt, Artificial Sequence
  GATA2 Guide RNA
auggaaacgaaggaggagggg

SEQ ID NO: 36773 - RNA, 21 nt, Artificial Sequence
  GATA2 Guide RNA
auuggaagcaggggauuuggc

SEQ ID NO: 36774 - RNA, 21 nt, Artificial Sequence
  GATA2 Guide RNA
auuuggcuuuaaacgacucug

SEQ ID NO: 36775 - RNA, 21 nt, Artificial Sequence
  GATA2 Guide RNA
caaaguuugcaguaaauaccc

SEQ ID NO: 36776 - RNA, 21 nt, Artificial Sequence
  GATA2 Guide RNA
caaauccccugcuuccaaucc

SEQ ID NO: 36777 - RNA, 21 nt, Artificial Sequence
  GATA2 Guide RNA
caacagccugggcaggaagag

SEQ ID NO: 36778 - RNA, 21 nt, Artificial Sequence
  GATA2 Guide RNA
caaccaggaggguauuuacug

SEQ ID NO: 36779 - RNA, 21 nt, Artificial Sequence
  GATA2 Guide RNA
caaccgugugccugagaggca

SEQ ID NO: 36780 - RNA, 21 nt, Artificial Sequence
  GATA2 Guide RNA
caaguucucgggagggagucc

SEQ ID NO: 36781 - RNA, 21 nt, Artificial Sequence
  GATA2 Guide RNA
caauccucaccaggagggaug

SEQ ID NO: 36782 - RNA, 21 nt, Artificial Sequence
  GATA2 Guide RNA
cacacgguuggccugggccug

SEQ ID NO: 36783 - RNA, 21 nt, Artificial Sequence
  GATA2 Guide RNA
caccaggagggauggaaacga

SEQ ID NO: 36784 - RNA, 21 nt, Artificial Sequence
  GATA2 Guide RNA
caccggcacugcucggcuggc

SEQ ID NO: 36785 - RNA, 21 nt, Artificial Sequence
  GATA2 Guide RNA
cacgggggccugcuuaaccgg

SEQ ID NO: 36786 - RNA, 21 nt, Artificial Sequence
  GATA2 Guide RNA
cacgguuggccugggccuggc

SEQ ID NO: 36787 - RNA, 21 nt, Artificial Sequence
  GATA2 Guide RNA
cacugcucggcuggcugcuuu

SEQ ID NO: 36788 - RNA, 21 nt, Artificial Sequence
  GATA2 Guide RNA
cagaacgccuggggcccuggg

SEQ ID NO: 36789 - RNA, 21 nt, Artificial Sequence
  GATA2 Guide RNA
cagagucguuuaaagccaaau

SEQ ID NO: 36790 - RNA, 21 nt, Artificial Sequence
  GATA2 Guide RNA
cagccagccgagcagugccgg

SEQ ID NO: 36791 - RNA, 21 nt, Artificial Sequence
  GATA2 Guide RNA
cagccaggcccaggccaaccg

SEQ ID NO: 36792 - RNA, 21 nt, Artificial Sequence
  GATA2 Guide RNA
cagccgagcagugccggugcc

SEQ ID NO: 36793 - RNA, 21 nt, Artificial Sequence
  GATA2 Guide RNA
caggaaagcagccagccgagc

SEQ ID NO: 36794 - RNA, 21 nt, Artificial Sequence
  GATA2 Guide RNA
caggagggauggaaacgaagg

SEQ ID NO: 36795 - RNA, 21 nt, Artificial Sequence
  GATA2 Guide RNA
caggaggguauuuacugcaaa

SEQ ID NO: 36796 - RNA, 21 nt, Artificial Sequence
  GATA2 Guide RNA
caggcacacgguuggccuggg

SEQ ID NO: 36797 - RNA, 21 nt, Artificial Sequence
  GATA2 Guide RNA
caggccaaccgugugccugag

SEQ ID NO: 36798 - RNA, 21 nt, Artificial Sequence
  GATA2 Guide RNA
caggcccaggccaaccgugug

SEQ ID NO: 36799 - RNA, 21 nt, Artificial Sequence
  GATA2 Guide RNA
caggcguucuggagcaaccag

SEQ ID NO: 36800 - RNA, 21 nt, Artificial Sequence
  GATA2 Guide RNA
caggcuguugcagccaggccc

SEQ ID NO: 36801 - RNA, 21 nt, Artificial Sequence
  GATA2 Guide RNA
cagggcaggaaagcagccagc

SEQ ID NO: 36802 - RNA, 21 nt, Artificial Sequence
  GATA2 Guide RNA
cagggccccaggcguucugga

SEQ ID NO: 36803 - RNA, 21 nt, Artificial Sequence
  GATA2 Guide RNA
caggggauuuggcuuuaaacg

SEQ ID NO: 36804 - RNA, 21 nt, Artificial Sequence
  GATA2 Guide RNA
caguaaauacccuccugguug

SEQ ID NO: 36805 - RNA, 21 nt, Artificial Sequence
  GATA2 Guide RNA
cagugccggugccucucaggc

SEQ ID NO: 36806 - RNA, 21 nt, Artificial Sequence
  GATA2 Guide RNA
caucccuccuggugaggauug

SEQ ID NO: 36807 - RNA, 21 nt, Artificial Sequence
  GATA2 Guide RNA
ccaaauccccugcuuccaauc

SEQ ID NO: 36808 - RNA, 21 nt, Artificial Sequence
  GATA2 Guide RNA
ccaaccgugugccugagaggc

SEQ ID NO: 36809 - RNA, 21 nt, Artificial Sequence
  GATA2 Guide RNA
ccaauccucaccaggagggau

SEQ ID NO: 36810 - RNA, 21 nt, Artificial Sequence
  GATA2 Guide RNA
ccagaacgccuggggcccugg

SEQ ID NO: 36811 - RNA, 21 nt, Artificial Sequence
  GATA2 Guide RNA
ccagagucguuuaaagccaaa

SEQ ID NO: 36812 - RNA, 21 nt, Artificial Sequence
  GATA2 Guide RNA
ccagccgagcagugccggugc

SEQ ID NO: 36813 - RNA, 21 nt, Artificial Sequence
  GATA2 Guide RNA
ccaggagggauggaaacgaag

SEQ ID NO: 36814 - RNA, 21 nt, Artificial Sequence
  GATA2 Guide RNA
ccaggaggguauuuacugcaa

SEQ ID NO: 36815 - RNA, 21 nt, Artificial Sequence
  GATA2 Guide RNA
ccaggccaaccgugugccuga

SEQ ID NO: 36816 - RNA, 21 nt, Artificial Sequence
  GATA2 Guide RNA
ccaggcccaggccaaccgugu

SEQ ID NO: 36817 - RNA, 21 nt, Artificial Sequence
  GATA2 Guide RNA
ccaggcguucuggagcaacca

SEQ ID NO: 36818 - RNA, 21 nt, Artificial Sequence
  GATA2 Guide RNA
ccaggcuguugcagccaggcc

SEQ ID NO: 36819 - RNA, 21 nt, Artificial Sequence
  GATA2 Guide RNA
ccagggcaggaaagcagccag

SEQ ID NO: 36820 - RNA, 21 nt, Artificial Sequence
  GATA2 Guide RNA
ccagggccccaggcguucugg

SEQ ID NO: 36821 - RNA, 21 nt, Artificial Sequence
  GATA2 Guide RNA
ccaucccuccuggugaggauu

SEQ ID NO: 36822 - RNA, 21 nt, Artificial Sequence
  GATA2 Guide RNA
cccaggccaaccgugugccug

SEQ ID NO: 36823 - RNA, 21 nt, Artificial Sequence
  GATA2 Guide RNA
cccaggcguucuggagcaacc

SEQ ID NO: 36824 - RNA, 21 nt, Artificial Sequence
  GATA2 Guide RNA
cccaggcuguugcagccaggc

SEQ ID NO: 36825 - RNA, 21 nt, Artificial Sequence
  GATA2 Guide RNA
cccagggccccaggcguucug

SEQ ID NO: 36826 - RNA, 21 nt, Artificial Sequence
  GATA2 Guide RNA
ccccaggcguucuggagcaac

SEQ ID NO: 36827 - RNA, 21 nt, Artificial Sequence
  GATA2 Guide RNA
cccccucccaugugggagacc

SEQ ID NO: 36828 - RNA, 21 nt, Artificial Sequence
  GATA2 Guide RNA
ccccuccuccccuccuccuuc

SEQ ID NO: 36829 - RNA, 21 nt, Artificial Sequence
  GATA2 Guide RNA
ccccuccuccuucguuuccau

SEQ ID NO: 36830 - RNA, 21 nt, Artificial Sequence
  GATA2 Guide RNA
ccccugcuuccaauccucacc

SEQ ID NO: 36831 - RNA, 21 nt, Artificial Sequence
  GATA2 Guide RNA
cccgagaacuugccgguuaag

SEQ ID NO: 36832 - RNA, 21 nt, Artificial Sequence
  GATA2 Guide RNA
cccucccgagaacuugccggu

SEQ ID NO: 36833 - RNA, 21 nt, Artificial Sequence
  GATA2 Guide RNA
cccuccuccccuccuccuucg

SEQ ID NO: 36834 - RNA, 21 nt, Artificial Sequence
  GATA2 Guide RNA
cccuccuccuucguuuccauc

SEQ ID NO: 36835 - RNA, 21 nt, Artificial Sequence
  GATA2 Guide RNA
cccuccuggugaggauuggaa

SEQ ID NO: 36836 - RNA, 21 nt, Artificial Sequence
  GATA2 Guide RNA
cccuccugguugcuccagaac

SEQ ID NO: 36837 - RNA, 21 nt, Artificial Sequence
  GATA2 Guide RNA
cccucuuccugcccaggcugu

SEQ ID NO: 36838 - RNA, 21 nt, Artificial Sequence
  GATA2 Guide RNA
cccugcuuccaauccucacca

SEQ ID NO: 36839 - RNA, 21 nt, Artificial Sequence
  GATA2 Guide RNA
cccuggacucccucccgagaa

SEQ ID NO: 36840 - RNA, 21 nt, Artificial Sequence
  GATA2 Guide RNA
ccgagaacuugccgguuaagc

SEQ ID NO: 36841 - RNA, 21 nt, Artificial Sequence
  GATA2 Guide RNA
ccgagcagugccggugccucu

SEQ ID NO: 36842 - RNA, 21 nt, Artificial Sequence
  GATA2 Guide RNA
ccggcaaguucucgggaggga

SEQ ID NO: 36843 - RNA, 21 nt, Artificial Sequence
  GATA2 Guide RNA
ccggcacugcucggcuggcug

SEQ ID NO: 36844 - RNA, 21 nt, Artificial Sequence
  GATA2 Guide RNA
ccggugccucucaggcacacg

SEQ ID NO: 36845 - RNA, 21 nt, Artificial Sequence
  GATA2 Guide RNA
ccgugugccugagaggcaccg

SEQ ID NO: 36846 - RNA, 21 nt, Artificial Sequence
  GATA2 Guide RNA
ccucaccaggagggauggaaa

SEQ ID NO: 36847 - RNA, 21 nt, Artificial Sequence
  GATA2 Guide RNA
ccuccccuccuccuucguuuc

SEQ ID NO: 36848 - RNA, 21 nt, Artificial Sequence
  GATA2 Guide RNA
ccucccgagaacuugccgguu

SEQ ID NO: 36849 - RNA, 21 nt, Artificial Sequence
  GATA2 Guide RNA
ccuccuccccuccuccuucgu

SEQ ID NO: 36850 - RNA, 21 nt, Artificial Sequence
  GATA2 Guide RNA
ccuccuccuucguuuccaucc

SEQ ID NO: 36851 - RNA, 21 nt, Artificial Sequence
  GATA2 Guide RNA
ccuccuggugaggauuggaag

SEQ ID NO: 36852 - RNA, 21 nt, Artificial Sequence
  GATA2 Guide RNA
ccuccugguugcuccagaacg

SEQ ID NO: 36853 - RNA, 21 nt, Artificial Sequence
  GATA2 Guide RNA
ccuccuucguuuccaucccuc

SEQ ID NO: 36854 - RNA, 21 nt, Artificial Sequence
  GATA2 Guide RNA
ccucucaggcacacgguuggc

SEQ ID NO: 36855 - RNA, 21 nt, Artificial Sequence
  GATA2 Guide RNA
ccucuuccugcccaggcuguu

SEQ ID NO: 36856 - RNA, 21 nt, Artificial Sequence
  GATA2 Guide RNA
ccugagaggcaccggcacugc

SEQ ID NO: 36857 - RNA, 21 nt, Artificial Sequence
  GATA2 Guide RNA
ccugcccaggcuguugcagcc

SEQ ID NO: 36858 - RNA, 21 nt, Artificial Sequence
  GATA2 Guide RNA
ccugcccuggacucccucccg

SEQ ID NO: 36859 - RNA, 21 nt, Artificial Sequence
  GATA2 Guide RNA
ccugcuuaaccggcaaguucu

SEQ ID NO: 36860 - RNA, 21 nt, Artificial Sequence
  GATA2 Guide RNA
ccugcuuccaauccucaccag

SEQ ID NO: 36861 - RNA, 21 nt, Artificial Sequence
  GATA2 Guide RNA
ccuggacucccucccgagaac

SEQ ID NO: 36862 - RNA, 21 nt, Artificial Sequence
  GATA2 Guide RNA
ccuggcugcaacagccugggc

SEQ ID NO: 36863 - RNA, 21 nt, Artificial Sequence
  GATA2 Guide RNA
ccugggccuggcugcaacagc

SEQ ID NO: 36864 - RNA, 21 nt, Artificial Sequence
  GATA2 Guide RNA
ccuggugaggauuggaagcag

SEQ ID NO: 36865 - RNA, 21 nt, Artificial Sequence
  GATA2 Guide RNA
ccugguugcuccagaacgccu

SEQ ID NO: 36866 - RNA, 21 nt, Artificial Sequence
  GATA2 Guide RNA
ccuucguuuccaucccuccug

SEQ ID NO: 36867 - RNA, 21 nt, Artificial Sequence
  GATA2 Guide RNA
cgaaggaggaggggaggaggg

SEQ ID NO: 36868 - RNA, 21 nt, Artificial Sequence
  GATA2 Guide RNA
cgagaacuugccgguuaagca

SEQ ID NO: 36869 - RNA, 21 nt, Artificial Sequence
  GATA2 Guide RNA
cgagcagugccggugccucuc

SEQ ID NO: 36870 - RNA, 21 nt, Artificial Sequence
  GATA2 Guide RNA
cggcaaguucucgggagggag

SEQ ID NO: 36871 - RNA, 21 nt, Artificial Sequence
  GATA2 Guide RNA
cggcacugcucggcuggcugc

SEQ ID NO: 36872 - RNA, 21 nt, Artificial Sequence
  GATA2 Guide RNA
cggcuggcugcuuuccugccc

SEQ ID NO: 36873 - RNA, 21 nt, Artificial Sequence
  GATA2 Guide RNA
cgggagggaguccagggcagg

SEQ ID NO: 36874 - RNA, 21 nt, Artificial Sequence
  GATA2 Guide RNA
cgggggccugcuuaaccggca

SEQ ID NO: 36875 - RNA, 21 nt, Artificial Sequence
  GATA2 Guide RNA
cggugccucucaggcacacgg

SEQ ID NO: 36876 - RNA, 21 nt, Artificial Sequence
  GATA2 Guide RNA
cgguuggccugggccuggcug

SEQ ID NO: 36877 - RNA, 21 nt, Artificial Sequence
  GATA2 Guide RNA
cgucccucuuccugcccaggc

SEQ ID NO: 36878 - RNA, 21 nt, Artificial Sequence
  GATA2 Guide RNA
cgugugccugagaggcaccgg

SEQ ID NO: 36879 - RNA, 21 nt, Artificial Sequence
  GATA2 Guide RNA
cguucuggagcaaccaggagg

SEQ ID NO: 36880 - RNA, 21 nt, Artificial Sequence
  GATA2 Guide RNA
cguuuaaagccaaauccccug

SEQ ID NO: 36881 - RNA, 21 nt, Artificial Sequence
  GATA2 Guide RNA
cguuuccaucccuccugguga

SEQ ID NO: 36882 - RNA, 21 nt, Artificial Sequence
  GATA2 Guide RNA
cucaccaggagggauggaaac

SEQ ID NO: 36883 - RNA, 21 nt, Artificial Sequence
  GATA2 Guide RNA
cucaggcacacgguuggccug

SEQ ID NO: 36884 - RNA, 21 nt, Artificial Sequence
  GATA2 Guide RNA
cuccagaacgccuggggcccu

SEQ ID NO: 36885 - RNA, 21 nt, Artificial Sequence
  GATA2 Guide RNA
cuccccuccuccuucguuucc

SEQ ID NO: 36886 - RNA, 21 nt, Artificial Sequence
  GATA2 Guide RNA
cucccgagaacuugccgguua

SEQ ID NO: 36887 - RNA, 21 nt, Artificial Sequence
  GATA2 Guide RNA
cucccucccgagaacuugccg

SEQ ID NO: 36888 - RNA, 21 nt, Artificial Sequence
  GATA2 Guide RNA
cuccuccccuccuccuucguu

SEQ ID NO: 36889 - RNA, 21 nt, Artificial Sequence
  GATA2 Guide RNA
cuccuccuucguuuccauccc

SEQ ID NO: 36890 - RNA, 21 nt, Artificial Sequence
  GATA2 Guide RNA
cuccuggugaggauuggaagc

SEQ ID NO: 36891 - RNA, 21 nt, Artificial Sequence
  GATA2 Guide RNA
cuccugguugcuccagaacgc

SEQ ID NO: 36892 - RNA, 21 nt, Artificial Sequence
  GATA2 Guide RNA
cuccuucguuuccaucccucc

SEQ ID NO: 36893 - RNA, 21 nt, Artificial Sequence
  GATA2 Guide RNA
cucggcuggcugcuuuccugc

SEQ ID NO: 36894 - RNA, 21 nt, Artificial Sequence
  GATA2 Guide RNA
cucgggagggaguccagggca

SEQ ID NO: 36895 - RNA, 21 nt, Artificial Sequence
  GATA2 Guide RNA
cucucaggcacacgguuggcc

SEQ ID NO: 36896 - RNA, 21 nt, Artificial Sequence
  GATA2 Guide RNA
cucuuccugcccaggcuguug

SEQ ID NO: 36897 - RNA, 21 nt, Artificial Sequence
  GATA2 Guide RNA
cugagaggcaccggcacugcu

SEQ ID NO: 36898 - RNA, 21 nt, Artificial Sequence
  GATA2 Guide RNA
cugcaacagccugggcaggaa

SEQ ID NO: 36899 - RNA, 21 nt, Artificial Sequence
  GATA2 Guide RNA
cugcccaggcuguugcagcca

SEQ ID NO: 36900 - RNA, 21 nt, Artificial Sequence
  GATA2 Guide RNA
cugcccuggacucccucccga

SEQ ID NO: 36901 - RNA, 21 nt, Artificial Sequence
  GATA2 Guide RNA
cugcucggcuggcugcuuucc

SEQ ID NO: 36902 - RNA, 21 nt, Artificial Sequence
  GATA2 Guide RNA
cugcuuaaccggcaaguucuc

SEQ ID NO: 36903 - RNA, 21 nt, Artificial Sequence
  GATA2 Guide RNA
cugcuuccaauccucaccagg

SEQ ID NO: 36904 - RNA, 21 nt, Artificial Sequence
  GATA2 Guide RNA
cugcuuuccugcccuggacuc

SEQ ID NO: 36905 - RNA, 21 nt, Artificial Sequence
  GATA2 Guide RNA
cuggacucccucccgagaacu

SEQ ID NO: 36906 - RNA, 21 nt, Artificial Sequence
  GATA2 Guide RNA
cuggagcaaccaggaggguau

SEQ ID NO: 36907 - RNA, 21 nt, Artificial Sequence
  GATA2 Guide RNA
cuggcugcaacagccugggca

SEQ ID NO: 36908 - RNA, 21 nt, Artificial Sequence
  GATA2 Guide RNA
cuggcugcuuuccugcccugg

SEQ ID NO: 36909 - RNA, 21 nt, Artificial Sequence
  GATA2 Guide RNA
cugggccccuccuccccuccu

SEQ ID NO: 36910 - RNA, 21 nt, Artificial Sequence
  GATA2 Guide RNA
cugggccuggcugcaacagcc

SEQ ID NO: 36911 - RNA, 21 nt, Artificial Sequence
  GATA2 Guide RNA
cuggugaggauuggaagcagg

SEQ ID NO: 36912 - RNA, 21 nt, Artificial Sequence
  GATA2 Guide RNA
cugguugcuccagaacgccug

SEQ ID NO: 36913 - RNA, 21 nt, Artificial Sequence
  GATA2 Guide RNA
cuguugcagccaggcccaggc

SEQ ID NO: 36914 - RNA, 21 nt, Artificial Sequence
  GATA2 Guide RNA
cuuaaccggcaaguucucggg

SEQ ID NO: 36915 - RNA, 21 nt, Artificial Sequence
  GATA2 Guide RNA
cuuccaauccucaccaggagg

SEQ ID NO: 36916 - RNA, 21 nt, Artificial Sequence
  GATA2 Guide RNA
cuuccugcccaggcuguugca

SEQ ID NO: 36917 - RNA, 21 nt, Artificial Sequence
  GATA2 Guide RNA
cuucguuuccaucccuccugg

SEQ ID NO: 36918 - RNA, 21 nt, Artificial Sequence
  GATA2 Guide RNA
cuugccgguuaagcaggcccc

SEQ ID NO: 36919 - RNA, 21 nt, Artificial Sequence
  GATA2 Guide RNA
cuuuccugcccuggacucccu

SEQ ID NO: 36920 - RNA, 21 nt, Artificial Sequence
  GATA2 Guide RNA
gaaacgaaggaggaggggagg

SEQ ID NO: 36921 - RNA, 21 nt, Artificial Sequence
  GATA2 Guide RNA
gaaagcagccagccgagcagu

SEQ ID NO: 36922 - RNA, 21 nt, Artificial Sequence
  GATA2 Guide RNA
gaacuugccgguuaagcaggc

SEQ ID NO: 36923 - RNA, 21 nt, Artificial Sequence
  GATA2 Guide RNA
gaagcaggggauuuggcuuua

SEQ ID NO: 36924 - RNA, 21 nt, Artificial Sequence
  GATA2 Guide RNA
gaaggaggaggggaggagggg

SEQ ID NO: 36925 - RNA, 21 nt, Artificial Sequence
  GATA2 Guide RNA
gacacgggggccugcuuaacc

SEQ ID NO: 36926 - RNA, 21 nt, Artificial Sequence
  GATA2 Guide RNA
gacucccucccgagaacuugc

SEQ ID NO: 36927 - RNA, 21 nt, Artificial Sequence
  GATA2 Guide RNA
gagaacuugccgguuaagcag

SEQ ID NO: 36928 - RNA, 21 nt, Artificial Sequence
  GATA2 Guide RNA
gagaggcaccggcacugcucg

SEQ ID NO: 36929 - RNA, 21 nt, Artificial Sequence
  GATA2 Guide RNA
gagcaaccaggaggguauuua

SEQ ID NO: 36930 - RNA, 21 nt, Artificial Sequence
  GATA2 Guide RNA
gagcagugccggugccucuca

SEQ ID NO: 36931 - RNA, 21 nt, Artificial Sequence
  GATA2 Guide RNA
gaggaggggaggaggggccca

SEQ ID NO: 36932 - RNA, 21 nt, Artificial Sequence
  GATA2 Guide RNA
gaggauuggaagcaggggauu

SEQ ID NO: 36933 - RNA, 21 nt, Artificial Sequence
  GATA2 Guide RNA
gaggcaccggcacugcucggc

SEQ ID NO: 36934 - RNA, 21 nt, Artificial Sequence
  GATA2 Guide RNA
gagggaguccagggcaggaaa

SEQ ID NO: 36935 - RNA, 21 nt, Artificial Sequence
  GATA2 Guide RNA
gagggauggaaacgaaggagg

SEQ ID NO: 36936 - RNA, 21 nt, Artificial Sequence
  GATA2 Guide RNA
gagggucucccacaugggagg

SEQ ID NO: 36937 - RNA, 21 nt, Artificial Sequence
  GATA2 Guide RNA
gaguccagggcaggaaagcag

SEQ ID NO: 36938 - RNA, 21 nt, Artificial Sequence
  GATA2 Guide RNA
gagucguuuaaagccaaaucc

SEQ ID NO: 36939 - RNA, 21 nt, Artificial Sequence
  GATA2 Guide RNA
gauggaaacgaaggaggaggg

SEQ ID NO: 36940 - RNA, 21 nt, Artificial Sequence
  GATA2 Guide RNA
gauuggaagcaggggauuugg

SEQ ID NO: 36941 - RNA, 21 nt, Artificial Sequence
  GATA2 Guide RNA
gauuuggcuuuaaacgacucu

SEQ ID NO: 36942 - RNA, 21 nt, Artificial Sequence
  GATA2 Guide RNA
gcaacagccugggcaggaaga

SEQ ID NO: 36943 - RNA, 21 nt, Artificial Sequence
  GATA2 Guide RNA
gcaaccaggaggguauuuacu

SEQ ID NO: 36944 - RNA, 21 nt, Artificial Sequence
  GATA2 Guide RNA
gcaaguucucgggagggaguc

SEQ ID NO: 36945 - RNA, 21 nt, Artificial Sequence
  GATA2 Guide RNA
gcacacgguuggccugggccu

SEQ ID NO: 36946 - RNA, 21 nt, Artificial Sequence
  GATA2 Guide RNA
gcaccggcacugcucggcugg

SEQ ID NO: 36947 - RNA, 21 nt, Artificial Sequence
  GATA2 Guide RNA
gcacugcucggcuggcugcuu

SEQ ID NO: 36948 - RNA, 21 nt, Artificial Sequence
  GATA2 Guide RNA
gcagccagccgagcagugccg

SEQ ID NO: 36949 - RNA, 21 nt, Artificial Sequence
  GATA2 Guide RNA
gcagccaggcccaggccaacc

SEQ ID NO: 36950 - RNA, 21 nt, Artificial Sequence
  GATA2 Guide RNA
gcaggaaagcagccagccgag

SEQ ID NO: 36951 - RNA, 21 nt, Artificial Sequence
  GATA2 Guide RNA
gcaggggauuuggcuuuaaac

SEQ ID NO: 36952 - RNA, 21 nt, Artificial Sequence
  GATA2 Guide RNA
gcaguaaauacccuccugguu

SEQ ID NO: 36953 - RNA, 21 nt, Artificial Sequence
  GATA2 Guide RNA
gcagugccggugccucucagg

SEQ ID NO: 36954 - RNA, 21 nt, Artificial Sequence
  GATA2 Guide RNA
gccaaauccccugcuuccaau

SEQ ID NO: 36955 - RNA, 21 nt, Artificial Sequence
  GATA2 Guide RNA
gccaaccgugugccugagagg

SEQ ID NO: 36956 - RNA, 21 nt, Artificial Sequence
  GATA2 Guide RNA
gccagccgagcagugccggug

SEQ ID NO: 36957 - RNA, 21 nt, Artificial Sequence
  GATA2 Guide RNA
gccaggcccaggccaaccgug

SEQ ID NO: 36958 - RNA, 21 nt, Artificial Sequence
  GATA2 Guide RNA
gcccaggccaaccgugugccu

SEQ ID NO: 36959 - RNA, 21 nt, Artificial Sequence
  GATA2 Guide RNA
gcccaggcuguugcagccagg

SEQ ID NO: 36960 - RNA, 21 nt, Artificial Sequence
  GATA2 Guide RNA
gcccagggccccaggcguucu

SEQ ID NO: 36961 - RNA, 21 nt, Artificial Sequence
  GATA2 Guide RNA
gccccaggcguucuggagcaa

SEQ ID NO: 36962 - RNA, 21 nt, Artificial Sequence
  GATA2 Guide RNA
gcccccucccaugugggagac

SEQ ID NO: 36963 - RNA, 21 nt, Artificial Sequence
  GATA2 Guide RNA
gccccuccuccccuccuccuu

SEQ ID NO: 36964 - RNA, 21 nt, Artificial Sequence
  GATA2 Guide RNA
gcccuggacucccucccgaga

SEQ ID NO: 36965 - RNA, 21 nt, Artificial Sequence
  GATA2 Guide RNA
gccgagcagugccggugccuc

SEQ ID NO: 36966 - RNA, 21 nt, Artificial Sequence
  GATA2 Guide RNA
gccggugccucucaggcacac

SEQ ID NO: 36967 - RNA, 21 nt, Artificial Sequence
  GATA2 Guide RNA
gccgguuaagcaggcccccgu

SEQ ID NO: 36968 - RNA, 21 nt, Artificial Sequence
  GATA2 Guide RNA
gccucucaggcacacgguugg

SEQ ID NO: 36969 - RNA, 21 nt, Artificial Sequence
  GATA2 Guide RNA
gccugagaggcaccggcacug

SEQ ID NO: 36970 - RNA, 21 nt, Artificial Sequence
  GATA2 Guide RNA
gccugcuuaaccggcaaguuc

SEQ ID NO: 36971 - RNA, 21 nt, Artificial Sequence
  GATA2 Guide RNA
gccuggcugcaacagccuggg

SEQ ID NO: 36972 - RNA, 21 nt, Artificial Sequence
  GATA2 Guide RNA
gccugggccuggcugcaacag

SEQ ID NO: 36973 - RNA, 21 nt, Artificial Sequence
  GATA2 Guide RNA
gcguucuggagcaaccaggag

SEQ ID NO: 36974 - RNA, 21 nt, Artificial Sequence
  GATA2 Guide RNA
gcuccagaacgccuggggccc

SEQ ID NO: 36975 - RNA, 21 nt, Artificial Sequence
  GATA2 Guide RNA
gcucggcuggcugcuuuccug

SEQ ID NO: 36976 - RNA, 21 nt, Artificial Sequence
  GATA2 Guide RNA
gcugcaacagccugggcagga

SEQ ID NO: 36977 - RNA, 21 nt, Artificial Sequence
  GATA2 Guide RNA
gcugcuuuccugcccuggacu

SEQ ID NO: 36978 - RNA, 21 nt, Artificial Sequence
  GATA2 Guide RNA
gcuggcugcuuuccugcccug

SEQ ID NO: 36979 - RNA, 21 nt, Artificial Sequence
  GATA2 Guide RNA
gcuguugcagccaggcccagg

SEQ ID NO: 36980 - RNA, 21 nt, Artificial Sequence
  GATA2 Guide RNA
gcuuaaccggcaaguucucgg

SEQ ID NO: 36981 - RNA, 21 nt, Artificial Sequence
  GATA2 Guide RNA
gcuuccaauccucaccaggag

SEQ ID NO: 36982 - RNA, 21 nt, Artificial Sequence
  GATA2 Guide RNA
gcuuuccugcccuggacuccc

SEQ ID NO: 36983 - RNA, 21 nt, Artificial Sequence
  GATA2 Guide RNA
ggaaacgaaggaggaggggag

SEQ ID NO: 36984 - RNA, 21 nt, Artificial Sequence
  GATA2 Guide RNA
ggaaagcagccagccgagcag

SEQ ID NO: 36985 - RNA, 21 nt, Artificial Sequence
  GATA2 Guide RNA
ggaagcaggggauuuggcuuu

SEQ ID NO: 36986 - RNA, 21 nt, Artificial Sequence
  GATA2 Guide RNA
ggacucccucccgagaacuug

SEQ ID NO: 36987 - RNA, 21 nt, Artificial Sequence
  GATA2 Guide RNA
ggagcaaccaggaggguauuu

SEQ ID NO: 36988 - RNA, 21 nt, Artificial Sequence
  GATA2 Guide RNA
ggagggaguccagggcaggaa

SEQ ID NO: 36989 - RNA, 21 nt, Artificial Sequence
  GATA2 Guide RNA
ggagggauggaaacgaaggag

SEQ ID NO: 36990 - RNA, 21 nt, Artificial Sequence
  GATA2 Guide RNA
ggaguccagggcaggaaagca

SEQ ID NO: 36991 - RNA, 21 nt, Artificial Sequence
  GATA2 Guide RNA
ggauggaaacgaaggaggagg

SEQ ID NO: 36992 - RNA, 21 nt, Artificial Sequence
  GATA2 Guide RNA
ggauuggaagcaggggauuug

SEQ ID NO: 36993 - RNA, 21 nt, Artificial Sequence
  GATA2 Guide RNA
ggauuuggcuuuaaacgacuc

SEQ ID NO: 36994 - RNA, 21 nt, Artificial Sequence
  GATA2 Guide RNA
ggcaaguucucgggagggagu

SEQ ID NO: 36995 - RNA, 21 nt, Artificial Sequence
  GATA2 Guide RNA
ggcacacgguuggccugggcc

SEQ ID NO: 36996 - RNA, 21 nt, Artificial Sequence
  GATA2 Guide RNA
ggcaccggcacugcucggcug

SEQ ID NO: 36997 - RNA, 21 nt, Artificial Sequence
  GATA2 Guide RNA
ggcacugcucggcuggcugcu

SEQ ID NO: 36998 - RNA, 21 nt, Artificial Sequence
  GATA2 Guide RNA
ggcaggaaagcagccagccga

SEQ ID NO: 36999 - RNA, 21 nt, Artificial Sequence
  GATA2 Guide RNA
ggccaaccgugugccugagag

SEQ ID NO: 37000 - RNA, 21 nt, Artificial Sequence
  GATA2 Guide RNA
ggcccaggccaaccgugugcc

SEQ ID NO: 37001 - RNA, 21 nt, Artificial Sequence
  GATA2 Guide RNA
ggccccaggcguucuggagca

SEQ ID NO: 37002 - RNA, 21 nt, Artificial Sequence
  GATA2 Guide RNA
ggccccuccuccccuccuccu

SEQ ID NO: 37003 - RNA, 21 nt, Artificial Sequence
  GATA2 Guide RNA
ggccugcuuaaccggcaaguu

SEQ ID NO: 37004 - RNA, 21 nt, Artificial Sequence
  GATA2 Guide RNA
ggccuggcugcaacagccugg

SEQ ID NO: 37005 - RNA, 21 nt, Artificial Sequence
  GATA2 Guide RNA
ggccugggccuggcugcaaca

SEQ ID NO: 37006 - RNA, 21 nt, Artificial Sequence
  GATA2 Guide RNA
ggcguucuggagcaaccagga

SEQ ID NO: 37007 - RNA, 21 nt, Artificial Sequence
  GATA2 Guide RNA
ggcugcaacagccugggcagg

SEQ ID NO: 37008 - RNA, 21 nt, Artificial Sequence
  GATA2 Guide RNA
ggcugcuuuccugcccuggac

SEQ ID NO: 37009 - RNA, 21 nt, Artificial Sequence
  GATA2 Guide RNA
ggcuggcugcuuuccugcccu

SEQ ID NO: 37010 - RNA, 21 nt, Artificial Sequence
  GATA2 Guide RNA
ggcuguugcagccaggcccag

SEQ ID NO: 37011 - RNA, 21 nt, Artificial Sequence
  GATA2 Guide RNA
gggagggaguccagggcagga

SEQ ID NO: 37012 - RNA, 21 nt, Artificial Sequence
  GATA2 Guide RNA
gggaguccagggcaggaaagc

SEQ ID NO: 37013 - RNA, 21 nt, Artificial Sequence
  GATA2 Guide RNA
gggauggaaacgaaggaggag

SEQ ID NO: 37014 - RNA, 21 nt, Artificial Sequence
  GATA2 Guide RNA
gggauuuggcuuuaaacgacu

SEQ ID NO: 37015 - RNA, 21 nt, Artificial Sequence
  GATA2 Guide RNA
gggcaggaaagcagccagccg

SEQ ID NO: 37016 - RNA, 21 nt, Artificial Sequence
  GATA2 Guide RNA
gggccccaggcguucuggagc

SEQ ID NO: 37017 - RNA, 21 nt, Artificial Sequence
  GATA2 Guide RNA
gggccugcuuaaccggcaagu

SEQ ID NO: 37018 - RNA, 21 nt, Artificial Sequence
  GATA2 Guide RNA
gggccuggcugcaacagccug

SEQ ID NO: 37019 - RNA, 21 nt, Artificial Sequence
  GATA2 Guide RNA
ggggauuuggcuuuaaacgac

SEQ ID NO: 37020 - RNA, 21 nt, Artificial Sequence
  GATA2 Guide RNA
ggggccugcuuaaccggcaag

SEQ ID NO: 37021 - RNA, 21 nt, Artificial Sequence
  GATA2 Guide RNA
gggggccugcuuaaccggcaa

SEQ ID NO: 37022 - RNA, 21 nt, Artificial Sequence
  GATA2 Guide RNA
gggucucccacaugggagggg

SEQ ID NO: 37023 - RNA, 21 nt, Artificial Sequence
  GATA2 Guide RNA
gguccagagucguuuaaagcc

SEQ ID NO: 37024 - RNA, 21 nt, Artificial Sequence
  GATA2 Guide RNA
ggucucccacaugggaggggg

SEQ ID NO: 37025 - RNA, 21 nt, Artificial Sequence
  GATA2 Guide RNA
ggugaggauuggaagcagggg

SEQ ID NO: 37026 - RNA, 21 nt, Artificial Sequence
  GATA2 Guide RNA
ggugccucucaggcacacggu

SEQ ID NO: 37027 - RNA, 21 nt, Artificial Sequence
  GATA2 Guide RNA
gguugcuccagaacgccuggg

SEQ ID NO: 37028 - RNA, 21 nt, Artificial Sequence
  GATA2 Guide RNA
gguuggccugggccuggcugc

SEQ ID NO: 37029 - RNA, 21 nt, Artificial Sequence
  GATA2 Guide RNA
guaaauacccuccugguugcu

SEQ ID NO: 37030 - RNA, 21 nt, Artificial Sequence
  GATA2 Guide RNA
guccagagucguuuaaagcca

SEQ ID NO: 37031 - RNA, 21 nt, Artificial Sequence
  GATA2 Guide RNA
guccagggcaggaaagcagcc

SEQ ID NO: 37032 - RNA, 21 nt, Artificial Sequence
  GATA2 Guide RNA
gucccucuuccugcccaggcu

SEQ ID NO: 37033 - RNA, 21 nt, Artificial Sequence
  GATA2 Guide RNA
gucguuuaaagccaaaucccc

SEQ ID NO: 37034 - RNA, 21 nt, Artificial Sequence
  GATA2 Guide RNA
gugaggauuggaagcagggga

SEQ ID NO: 37035 - RNA, 21 nt, Artificial Sequence
  GATA2 Guide RNA
gugcccccucccaugugggag

SEQ ID NO: 37036 - RNA, 21 nt, Artificial Sequence
  GATA2 Guide RNA
gugccggugccucucaggcac

SEQ ID NO: 37037 - RNA, 21 nt, Artificial Sequence
  GATA2 Guide RNA
gugccucucaggcacacgguu

SEQ ID NO: 37038 - RNA, 21 nt, Artificial Sequence
  GATA2 Guide RNA
gugccugagaggcaccggcac

SEQ ID NO: 37039 - RNA, 21 nt, Artificial Sequence
  GATA2 Guide RNA
gugugccugagaggcaccggc

SEQ ID NO: 37040 - RNA, 21 nt, Artificial Sequence
  GATA2 Guide RNA
guucucgggagggaguccagg

SEQ ID NO: 37041 - RNA, 21 nt, Artificial Sequence
  GATA2 Guide RNA
guucuggagcaaccaggaggg

SEQ ID NO: 37042 - RNA, 21 nt, Artificial Sequence
  GATA2 Guide RNA
guugcagccaggcccaggcca

SEQ ID NO: 37043 - RNA, 21 nt, Artificial Sequence
  GATA2 Guide RNA
guugcuccagaacgccugggg

SEQ ID NO: 37044 - RNA, 21 nt, Artificial Sequence
  GATA2 Guide RNA
guuggccugggccuggcugca

SEQ ID NO: 37045 - RNA, 21 nt, Artificial Sequence
  GATA2 Guide RNA
guuuaaagccaaauccccugc

SEQ ID NO: 37046 - RNA, 21 nt, Artificial Sequence
  GATA2 Guide RNA
guuuccaucccuccuggugag

SEQ ID NO: 37047 - RNA, 21 nt, Artificial Sequence
  GATA2 Guide RNA
guuugcaguaaauacccuccu

SEQ ID NO: 37048 - RNA, 21 nt, Artificial Sequence
  GATA2 Guide RNA
uaaagccaaauccccugcuuc

SEQ ID NO: 37049 - RNA, 21 nt, Artificial Sequence
  GATA2 Guide RNA
uaaauacccuccugguugcuc

SEQ ID NO: 37050 - RNA, 21 nt, Artificial Sequence
  GATA2 Guide RNA
uaaccggcaaguucucgggag

SEQ ID NO: 37051 - RNA, 21 nt, Artificial Sequence
  GATA2 Guide RNA
uacccuccugguugcuccaga

SEQ ID NO: 37052 - RNA, 21 nt, Artificial Sequence
  GATA2 Guide RNA
ucaccaggagggauggaaacg

SEQ ID NO: 37053 - RNA, 21 nt, Artificial Sequence
  GATA2 Guide RNA
ucaggcacacgguuggccugg

SEQ ID NO: 37054 - RNA, 21 nt, Artificial Sequence
  GATA2 Guide RNA
uccaauccucaccaggaggga

SEQ ID NO: 37055 - RNA, 21 nt, Artificial Sequence
  GATA2 Guide RNA
uccagaacgccuggggcccug

SEQ ID NO: 37056 - RNA, 21 nt, Artificial Sequence
  GATA2 Guide RNA
uccagagucguuuaaagccaa

SEQ ID NO: 37057 - RNA, 21 nt, Artificial Sequence
  GATA2 Guide RNA
uccagggcaggaaagcagcca

SEQ ID NO: 37058 - RNA, 21 nt, Artificial Sequence
  GATA2 Guide RNA
uccaucccuccuggugaggau

SEQ ID NO: 37059 - RNA, 21 nt, Artificial Sequence
  GATA2 Guide RNA
uccccuccuccuucguuucca

SEQ ID NO: 37060 - RNA, 21 nt, Artificial Sequence
  GATA2 Guide RNA
uccccugcuuccaauccucac

SEQ ID NO: 37061 - RNA, 21 nt, Artificial Sequence
  GATA2 Guide RNA
ucccgagaacuugccgguuaa

SEQ ID NO: 37062 - RNA, 21 nt, Artificial Sequence
  GATA2 Guide RNA
ucccucccgagaacuugccgg

SEQ ID NO: 37063 - RNA, 21 nt, Artificial Sequence
  GATA2 Guide RNA
ucccuccuggugaggauugga

SEQ ID NO: 37064 - RNA, 21 nt, Artificial Sequence
  GATA2 Guide RNA
ucccucuuccugcccaggcug

SEQ ID NO: 37065 - RNA, 21 nt, Artificial Sequence
  GATA2 Guide RNA
uccucaccaggagggauggaa

SEQ ID NO: 37066 - RNA, 21 nt, Artificial Sequence
  GATA2 Guide RNA
uccuccccuccuccuucguuu

SEQ ID NO: 37067 - RNA, 21 nt, Artificial Sequence
  GATA2 Guide RNA
uccuccuucguuuccaucccu

SEQ ID NO: 37068 - RNA, 21 nt, Artificial Sequence
  GATA2 Guide RNA
uccugcccaggcuguugcagc

SEQ ID NO: 37069 - RNA, 21 nt, Artificial Sequence
  GATA2 Guide RNA
uccugcccuggacucccuccc

SEQ ID NO: 37070 - RNA, 21 nt, Artificial Sequence
  GATA2 Guide RNA
uccuggugaggauuggaagca

SEQ ID NO: 37071 - RNA, 21 nt, Artificial Sequence
  GATA2 Guide RNA
uccugguugcuccagaacgcc

SEQ ID NO: 37072 - RNA, 21 nt, Artificial Sequence
  GATA2 Guide RNA
uccuucguuuccaucccuccu

SEQ ID NO: 37073 - RNA, 21 nt, Artificial Sequence
  GATA2 Guide RNA
ucggcuggcugcuuuccugcc

SEQ ID NO: 37074 - RNA, 21 nt, Artificial Sequence
  GATA2 Guide RNA
ucgggagggaguccagggcag

SEQ ID NO: 37075 - RNA, 21 nt, Artificial Sequence
  GATA2 Guide RNA
ucguuuaaagccaaauccccu

SEQ ID NO: 37076 - RNA, 21 nt, Artificial Sequence
  GATA2 Guide RNA
ucguuuccaucccuccuggug

SEQ ID NO: 37077 - RNA, 21 nt, Artificial Sequence
  GATA2 Guide RNA
ucucaggcacacgguuggccu

SEQ ID NO: 37078 - RNA, 21 nt, Artificial Sequence
  GATA2 Guide RNA
ucucgggagggaguccagggc

SEQ ID NO: 37079 - RNA, 21 nt, Artificial Sequence
  GATA2 Guide RNA
ucuggagcaaccaggagggua

SEQ ID NO: 37080 - RNA, 21 nt, Artificial Sequence
  GATA2 Guide RNA
ucuuccugcccaggcuguugc

SEQ ID NO: 37081 - RNA, 21 nt, Artificial Sequence
  GATA2 Guide RNA
ugagaggcaccggcacugcuc

SEQ ID NO: 37082 - RNA, 21 nt, Artificial Sequence
  GATA2 Guide RNA
ugaggauuggaagcaggggau

SEQ ID NO: 37083 - RNA, 21 nt, Artificial Sequence
  GATA2 Guide RNA
ugcaacagccugggcaggaag

SEQ ID NO: 37084 - RNA, 21 nt, Artificial Sequence
  GATA2 Guide RNA
ugcagccaggcccaggccaac

SEQ ID NO: 37085 - RNA, 21 nt, Artificial Sequence
  GATA2 Guide RNA
ugcaguaaauacccuccuggu

SEQ ID NO: 37086 - RNA, 21 nt, Artificial Sequence
  GATA2 Guide RNA
ugcccaggcuguugcagccag

SEQ ID NO: 37087 - RNA, 21 nt, Artificial Sequence
  GATA2 Guide RNA
ugcccccucccaugugggaga

SEQ ID NO: 37088 - RNA, 21 nt, Artificial Sequence
  GATA2 Guide RNA
ugcccuggacucccucccgag

SEQ ID NO: 37089 - RNA, 21 nt, Artificial Sequence
  GATA2 Guide RNA
ugccggugccucucaggcaca

SEQ ID NO: 37090 - RNA, 21 nt, Artificial Sequence
  GATA2 Guide RNA
ugccgguuaagcaggcccccg

SEQ ID NO: 37091 - RNA, 21 nt, Artificial Sequence
  GATA2 Guide RNA
ugccucucaggcacacgguug

SEQ ID NO: 37092 - RNA, 21 nt, Artificial Sequence
  GATA2 Guide RNA
ugccugagaggcaccggcacu

SEQ ID NO: 37093 - RNA, 21 nt, Artificial Sequence
  GATA2 Guide RNA
ugcuccagaacgccuggggcc

SEQ ID NO: 37094 - RNA, 21 nt, Artificial Sequence
  GATA2 Guide RNA
ugcucggcuggcugcuuuccu

SEQ ID NO: 37095 - RNA, 21 nt, Artificial Sequence
  GATA2 Guide RNA
ugcuuaaccggcaaguucucg

SEQ ID NO: 37096 - RNA, 21 nt, Artificial Sequence
  GATA2 Guide RNA
ugcuuccaauccucaccagga

SEQ ID NO: 37097 - RNA, 21 nt, Artificial Sequence
  GATA2 Guide RNA
ugcuuuccugcccuggacucc

SEQ ID NO: 37098 - RNA, 21 nt, Artificial Sequence
  GATA2 Guide RNA
uggaaacgaaggaggagggga

SEQ ID NO: 37099 - RNA, 21 nt, Artificial Sequence
  GATA2 Guide RNA
uggaagcaggggauuuggcuu

SEQ ID NO: 37100 - RNA, 21 nt, Artificial Sequence
  GATA2 Guide RNA
uggacucccucccgagaacuu

SEQ ID NO: 37101 - RNA, 21 nt, Artificial Sequence
  GATA2 Guide RNA
uggagcaaccaggaggguauu

SEQ ID NO: 37102 - RNA, 21 nt, Artificial Sequence
  GATA2 Guide RNA
uggccugggccuggcugcaac

SEQ ID NO: 37103 - RNA, 21 nt, Artificial Sequence
  GATA2 Guide RNA
uggcugcaacagccugggcag

SEQ ID NO: 37104 - RNA, 21 nt, Artificial Sequence
  GATA2 Guide RNA
uggcugcuuuccugcccugga

SEQ ID NO: 37105 - RNA, 21 nt, Artificial Sequence
  GATA2 Guide RNA
ugggccccuccuccccuccuc

SEQ ID NO: 37106 - RNA, 21 nt, Artificial Sequence
  GATA2 Guide RNA
ugggccuggcugcaacagccu

SEQ ID NO: 37107 - RNA, 21 nt, Artificial Sequence
  GATA2 Guide RNA
uggugaggauuggaagcaggg

SEQ ID NO: 37108 - RNA, 21 nt, Artificial Sequence
  GATA2 Guide RNA
ugguugcuccagaacgccugg

SEQ ID NO: 37109 - RNA, 21 nt, Artificial Sequence
  GATA2 Guide RNA
ugugcccccucccauguggga

SEQ ID NO: 37110 - RNA, 21 nt, Artificial Sequence
  GATA2 Guide RNA
ugugccugagaggcaccggca

SEQ ID NO: 37111 - RNA, 21 nt, Artificial Sequence
  GATA2 Guide RNA
uguugcagccaggcccaggcc

SEQ ID NO: 37112 - RNA, 21 nt, Artificial Sequence
  GATA2 Guide RNA
uuaaagccaaauccccugcuu

SEQ ID NO: 37113 - RNA, 21 nt, Artificial Sequence
  GATA2 Guide RNA
uuaaccggcaaguucucggga

SEQ ID NO: 37114 - RNA, 21 nt, Artificial Sequence
  GATA2 Guide RNA
uuccaauccucaccaggaggg

SEQ ID NO: 37115 - RNA, 21 nt, Artificial Sequence
  GATA2 Guide RNA
uuccaucccuccuggugagga

SEQ ID NO: 37116 - RNA, 21 nt, Artificial Sequence
  GATA2 Guide RNA
uuccugcccaggcuguugcag

SEQ ID NO: 37117 - RNA, 21 nt, Artificial Sequence
  GATA2 Guide RNA
uuccugcccuggacucccucc

SEQ ID NO: 37118 - RNA, 21 nt, Artificial Sequence
  GATA2 Guide RNA
uucguuuccaucccuccuggu

SEQ ID NO: 37119 - RNA, 21 nt, Artificial Sequence
  GATA2 Guide RNA
uucucgggagggaguccaggg

SEQ ID NO: 37120 - RNA, 21 nt, Artificial Sequence
  GATA2 Guide RNA
uucuggagcaaccaggagggu

SEQ ID NO: 37121 - RNA, 21 nt, Artificial Sequence
  GATA2 Guide RNA
uugcagccaggcccaggccaa

SEQ ID NO: 37122 - RNA, 21 nt, Artificial Sequence
  GATA2 Guide RNA
uugcaguaaauacccuccugg

SEQ ID NO: 37123 - RNA, 21 nt, Artificial Sequence
  GATA2 Guide RNA
uugccgguuaagcaggccccc

SEQ ID NO: 37124 - RNA, 21 nt, Artificial Sequence
  GATA2 Guide RNA
uugcuccagaacgccuggggc

SEQ ID NO: 37125 - RNA, 21 nt, Artificial Sequence
  GATA2 Guide RNA
uuggaagcaggggauuuggcu

SEQ ID NO: 37126 - RNA, 21 nt, Artificial Sequence
  GATA2 Guide RNA
uuggccugggccuggcugcaa

SEQ ID NO: 37127 - RNA, 21 nt, Artificial Sequence
  GATA2 Guide RNA
uuuaaagccaaauccccugcu

SEQ ID NO: 37128 - RNA, 21 nt, Artificial Sequence
  GATA2 Guide RNA
uuuccaucccuccuggugagg

SEQ ID NO: 37129 - RNA, 21 nt, Artificial Sequence
  GATA2 Guide RNA
uuuccugcccuggacucccuc

SEQ ID NO: 37130 - RNA, 21 nt, Artificial Sequence
  GATA2 Guide RNA
uuugcaguaaauacccuccug

SEQ ID NO: 37131 - RNA, 22 nt, Artificial Sequence
  GATA2 Guide RNA
aaacgaaggaggaggggaggag

SEQ ID NO: 37132 - RNA, 22 nt, Artificial Sequence
  GATA2 Guide RNA
aaagcagccagccgagcagugc

SEQ ID NO: 37133 - RNA, 22 nt, Artificial Sequence
  GATA2 Guide RNA
aaagccaaauccccugcuucca

SEQ ID NO: 37134 - RNA, 22 nt, Artificial Sequence
  GATA2 Guide RNA
aaaguuugcaguaaauacccuc

SEQ ID NO: 37135 - RNA, 22 nt, Artificial Sequence
  GATA2 Guide RNA
aaauacccuccugguugcucca

SEQ ID NO: 37136 - RNA, 22 nt, Artificial Sequence
  GATA2 Guide RNA
aaauccccugcuuccaauccuc

SEQ ID NO: 37137 - RNA, 22 nt, Artificial Sequence
  GATA2 Guide RNA
aaccaggaggguauuuacugca

SEQ ID NO: 37138 - RNA, 22 nt, Artificial Sequence
  GATA2 Guide RNA
aaccggcaaguucucgggaggg

SEQ ID NO: 37139 - RNA, 22 nt, Artificial Sequence
  GATA2 Guide RNA
aaccgugugccugagaggcacc

SEQ ID NO: 37140 - RNA, 22 nt, Artificial Sequence
  GATA2 Guide RNA
aacgaaggaggaggggaggagg

SEQ ID NO: 37141 - RNA, 22 nt, Artificial Sequence
  GATA2 Guide RNA
aacuugccgguuaagcaggccc

SEQ ID NO: 37142 - RNA, 22 nt, Artificial Sequence
  GATA2 Guide RNA
aagcagccagccgagcagugcc

SEQ ID NO: 37143 - RNA, 22 nt, Artificial Sequence
  GATA2 Guide RNA
aagcaggggauuuggcuuuaaa

SEQ ID NO: 37144 - RNA, 22 nt, Artificial Sequence
  GATA2 Guide RNA
aagccaaauccccugcuuccaa

SEQ ID NO: 37145 - RNA, 22 nt, Artificial Sequence
  GATA2 Guide RNA
aaggaggaggggaggaggggcc

SEQ ID NO: 37146 - RNA, 22 nt, Artificial Sequence
  GATA2 Guide RNA
aaguucucgggagggaguccag

SEQ ID NO: 37147 - RNA, 22 nt, Artificial Sequence
  GATA2 Guide RNA
aaguuugcaguaaauacccucc

SEQ ID NO: 37148 - RNA, 22 nt, Artificial Sequence
  GATA2 Guide RNA
aauacccuccugguugcuccag

SEQ ID NO: 37149 - RNA, 22 nt, Artificial Sequence
  GATA2 Guide RNA
aauccccugcuuccaauccuca

SEQ ID NO: 37150 - RNA, 22 nt, Artificial Sequence
  GATA2 Guide RNA
aauccucaccaggagggaugga

SEQ ID NO: 37151 - RNA, 22 nt, Artificial Sequence
  GATA2 Guide RNA
acacgggggccugcuuaaccgg

SEQ ID NO: 37152 - RNA, 22 nt, Artificial Sequence
  GATA2 Guide RNA
acacgguuggccugggccuggc

SEQ ID NO: 37153 - RNA, 22 nt, Artificial Sequence
  GATA2 Guide RNA
accaggagggauggaaacgaag

SEQ ID NO: 37154 - RNA, 22 nt, Artificial Sequence
  GATA2 Guide RNA
accaggaggguauuuacugcaa

SEQ ID NO: 37155 - RNA, 22 nt, Artificial Sequence
  GATA2 Guide RNA
acccuccugguugcuccagaac

SEQ ID NO: 37156 - RNA, 22 nt, Artificial Sequence
  GATA2 Guide RNA
accggcaaguucucgggaggga

SEQ ID NO: 37157 - RNA, 22 nt, Artificial Sequence
  GATA2 Guide RNA
accggcacugcucggcuggcug

SEQ ID NO: 37158 - RNA, 22 nt, Artificial Sequence
  GATA2 Guide RNA
accgugugccugagaggcaccg

SEQ ID NO: 37159 - RNA, 22 nt, Artificial Sequence
  GATA2 Guide RNA
acgaaggaggaggggaggaggg

SEQ ID NO: 37160 - RNA, 22 nt, Artificial Sequence
  GATA2 Guide RNA
acgggggccugcuuaaccggca

SEQ ID NO: 37161 - RNA, 22 nt, Artificial Sequence
  GATA2 Guide RNA
acgguuggccugggccuggcug

SEQ ID NO: 37162 - RNA, 22 nt, Artificial Sequence
  GATA2 Guide RNA
acucccucccgagaacuugccg

SEQ ID NO: 37163 - RNA, 22 nt, Artificial Sequence
  GATA2 Guide RNA
acugcucggcuggcugcuuucc

SEQ ID NO: 37164 - RNA, 22 nt, Artificial Sequence
  GATA2 Guide RNA
acuugccgguuaagcaggcccc

SEQ ID NO: 37165 - RNA, 22 nt, Artificial Sequence
  GATA2 Guide RNA
agaacgccuggggcccugggcc

SEQ ID NO: 37166 - RNA, 22 nt, Artificial Sequence
  GATA2 Guide RNA
agaacuugccgguuaagcaggc

SEQ ID NO: 37167 - RNA, 22 nt, Artificial Sequence
  GATA2 Guide RNA
agacacgggggccugcuuaacc

SEQ ID NO: 37168 - RNA, 22 nt, Artificial Sequence
  GATA2 Guide RNA
agaggcaccggcacugcucggc

SEQ ID NO: 37169 - RNA, 22 nt, Artificial Sequence
  GATA2 Guide RNA
agagggucucccacaugggagg

SEQ ID NO: 37170 - RNA, 22 nt, Artificial Sequence
  GATA2 Guide RNA
agagucguuuaaagccaaaucc

SEQ ID NO: 37171 - RNA, 22 nt, Artificial Sequence
  GATA2 Guide RNA
agcaaccaggaggguauuuacu

SEQ ID NO: 37172 - RNA, 22 nt, Artificial Sequence
  GATA2 Guide RNA
agcagccagccgagcagugccg

SEQ ID NO: 37173 - RNA, 22 nt, Artificial Sequence
  GATA2 Guide RNA
agcaggggauuuggcuuuaaac

SEQ ID NO: 37174 - RNA, 22 nt, Artificial Sequence
  GATA2 Guide RNA
agcagugccggugccucucagg

SEQ ID NO: 37175 - RNA, 22 nt, Artificial Sequence
  GATA2 Guide RNA
agccaaauccccugcuuccaau

SEQ ID NO: 37176 - RNA, 22 nt, Artificial Sequence
  GATA2 Guide RNA
agccagccgagcagugccggug

SEQ ID NO: 37177 - RNA, 22 nt, Artificial Sequence
  GATA2 Guide RNA
agccaggcccaggccaaccgug

SEQ ID NO: 37178 - RNA, 22 nt, Artificial Sequence
  GATA2 Guide RNA
agccgagcagugccggugccuc

SEQ ID NO: 37179 - RNA, 22 nt, Artificial Sequence
  GATA2 Guide RNA
aggaaagcagccagccgagcag

SEQ ID NO: 37180 - RNA, 22 nt, Artificial Sequence
  GATA2 Guide RNA
aggaggaggggaggaggggccc

SEQ ID NO: 37181 - RNA, 22 nt, Artificial Sequence
  GATA2 Guide RNA
aggagggauggaaacgaaggag

SEQ ID NO: 37182 - RNA, 22 nt, Artificial Sequence
  GATA2 Guide RNA
aggaggggaggaggggcccagg

SEQ ID NO: 37183 - RNA, 22 nt, Artificial Sequence
  GATA2 Guide RNA
aggauuggaagcaggggauuug

SEQ ID NO: 37184 - RNA, 22 nt, Artificial Sequence
  GATA2 Guide RNA
aggcacacgguuggccugggcc

SEQ ID NO: 37185 - RNA, 22 nt, Artificial Sequence
  GATA2 Guide RNA
aggcaccggcacugcucggcug

SEQ ID NO: 37186 - RNA, 22 nt, Artificial Sequence
  GATA2 Guide RNA
aggccaaccgugugccugagag

SEQ ID NO: 37187 - RNA, 22 nt, Artificial Sequence
  GATA2 Guide RNA
aggcccaggccaaccgugugcc

SEQ ID NO: 37188 - RNA, 22 nt, Artificial Sequence
  GATA2 Guide RNA
aggcguucuggagcaaccagga

SEQ ID NO: 37189 - RNA, 22 nt, Artificial Sequence
  GATA2 Guide RNA
aggcuguugcagccaggcccag

SEQ ID NO: 37190 - RNA, 22 nt, Artificial Sequence
  GATA2 Guide RNA
agggaguccagggcaggaaagc

SEQ ID NO: 37191 - RNA, 22 nt, Artificial Sequence
  GATA2 Guide RNA
agggauggaaacgaaggaggag

SEQ ID NO: 37192 - RNA, 22 nt, Artificial Sequence
  GATA2 Guide RNA
agggcaggaaagcagccagccg

SEQ ID NO: 37193 - RNA, 22 nt, Artificial Sequence
  GATA2 Guide RNA
agggccccaggcguucuggagc

SEQ ID NO: 37194 - RNA, 22 nt, Artificial Sequence
  GATA2 Guide RNA
aggggauuuggcuuuaaacgac

SEQ ID NO: 37195 - RNA, 22 nt, Artificial Sequence
  GATA2 Guide RNA
agggucucccacaugggagggg

SEQ ID NO: 37196 - RNA, 22 nt, Artificial Sequence
  GATA2 Guide RNA
aguaaauacccuccugguugcu

SEQ ID NO: 37197 - RNA, 22 nt, Artificial Sequence
  GATA2 Guide RNA
aguccagggcaggaaagcagcc

SEQ ID NO: 37198 - RNA, 22 nt, Artificial Sequence
  GATA2 Guide RNA
agucguuuaaagccaaaucccc

SEQ ID NO: 37199 - RNA, 22 nt, Artificial Sequence
  GATA2 Guide RNA
agugccggugccucucaggcac

SEQ ID NO: 37200 - RNA, 22 nt, Artificial Sequence
  GATA2 Guide RNA
aguucucgggagggaguccagg

SEQ ID NO: 37201 - RNA, 22 nt, Artificial Sequence
  GATA2 Guide RNA
aguuugcaguaaauacccuccu

SEQ ID NO: 37202 - RNA, 22 nt, Artificial Sequence
  GATA2 Guide RNA
auacccuccugguugcuccaga

SEQ ID NO: 37203 - RNA, 22 nt, Artificial Sequence
  GATA2 Guide RNA
auccccugcuuccaauccucac

SEQ ID NO: 37204 - RNA, 22 nt, Artificial Sequence
  GATA2 Guide RNA
aucccuccuggugaggauugga

SEQ ID NO: 37205 - RNA, 22 nt, Artificial Sequence
  GATA2 Guide RNA
auccucaccaggagggauggaa

SEQ ID NO: 37206 - RNA, 22 nt, Artificial Sequence
  GATA2 Guide RNA
auggaaacgaaggaggagggga

SEQ ID NO: 37207 - RNA, 22 nt, Artificial Sequence
  GATA2 Guide RNA
auuggaagcaggggauuuggcu

SEQ ID NO: 37208 - RNA, 22 nt, Artificial Sequence
  GATA2 Guide RNA
caaaguuugcaguaaauacccu

SEQ ID NO: 37209 - RNA, 22 nt, Artificial Sequence
  GATA2 Guide RNA
caaauccccugcuuccaauccu

SEQ ID NO: 37210 - RNA, 22 nt, Artificial Sequence
  GATA2 Guide RNA
caacagccugggcaggaagagg

SEQ ID NO: 37211 - RNA, 22 nt, Artificial Sequence
  GATA2 Guide RNA
caaccaggaggguauuuacugc

SEQ ID NO: 37212 - RNA, 22 nt, Artificial Sequence
  GATA2 Guide RNA
caaccgugugccugagaggcac

SEQ ID NO: 37213 - RNA, 22 nt, Artificial Sequence
  GATA2 Guide RNA
caaguucucgggagggagucca

SEQ ID NO: 37214 - RNA, 22 nt, Artificial Sequence
  GATA2 Guide RNA
caauccucaccaggagggaugg

SEQ ID NO: 37215 - RNA, 22 nt, Artificial Sequence
  GATA2 Guide RNA
cacacgguuggccugggccugg

SEQ ID NO: 37216 - RNA, 22 nt, Artificial Sequence
  GATA2 Guide RNA
caccaggagggauggaaacgaa

SEQ ID NO: 37217 - RNA, 22 nt, Artificial Sequence
  GATA2 Guide RNA
caccggcacugcucggcuggcu

SEQ ID NO: 37218 - RNA, 22 nt, Artificial Sequence
  GATA2 Guide RNA
cacgggggccugcuuaaccggc

SEQ ID NO: 37219 - RNA, 22 nt, Artificial Sequence
  GATA2 Guide RNA
cacgguuggccugggccuggcu

SEQ ID NO: 37220 - RNA, 22 nt, Artificial Sequence
  GATA2 Guide RNA
cacugcucggcuggcugcuuuc

SEQ ID NO: 37221 - RNA, 22 nt, Artificial Sequence
  GATA2 Guide RNA
cagaacgccuggggcccugggc

SEQ ID NO: 37222 - RNA, 22 nt, Artificial Sequence
  GATA2 Guide RNA
cagagucguuuaaagccaaauc

SEQ ID NO: 37223 - RNA, 22 nt, Artificial Sequence
  GATA2 Guide RNA
cagccagccgagcagugccggu

SEQ ID NO: 37224 - RNA, 22 nt, Artificial Sequence
  GATA2 Guide RNA
cagccaggcccaggccaaccgu

SEQ ID NO: 37225 - RNA, 22 nt, Artificial Sequence
  GATA2 Guide RNA
cagccgagcagugccggugccu

SEQ ID NO: 37226 - RNA, 22 nt, Artificial Sequence
  GATA2 Guide RNA
caggaaagcagccagccgagca

SEQ ID NO: 37227 - RNA, 22 nt, Artificial Sequence
  GATA2 Guide RNA
caggagggauggaaacgaagga

SEQ ID NO: 37228 - RNA, 22 nt, Artificial Sequence
  GATA2 Guide RNA
caggaggguauuuacugcaaac

SEQ ID NO: 37229 - RNA, 22 nt, Artificial Sequence
  GATA2 Guide RNA
caggcacacgguuggccugggc

SEQ ID NO: 37230 - RNA, 22 nt, Artificial Sequence
  GATA2 Guide RNA
caggccaaccgugugccugaga

SEQ ID NO: 37231 - RNA, 22 nt, Artificial Sequence
  GATA2 Guide RNA
caggcccaggccaaccgugugc

SEQ ID NO: 37232 - RNA, 22 nt, Artificial Sequence
  GATA2 Guide RNA
caggcguucuggagcaaccagg

SEQ ID NO: 37233 - RNA, 22 nt, Artificial Sequence
  GATA2 Guide RNA
caggcuguugcagccaggccca

SEQ ID NO: 37234 - RNA, 22 nt, Artificial Sequence
  GATA2 Guide RNA
cagggcaggaaagcagccagcc

SEQ ID NO: 37235 - RNA, 22 nt, Artificial Sequence
  GATA2 Guide RNA
cagggccccaggcguucuggag

SEQ ID NO: 37236 - RNA, 22 nt, Artificial Sequence
  GATA2 Guide RNA
caggggauuuggcuuuaaacga

SEQ ID NO: 37237 - RNA, 22 nt, Artificial Sequence
  GATA2 Guide RNA
caguaaauacccuccugguugc

SEQ ID NO: 37238 - RNA, 22 nt, Artificial Sequence
  GATA2 Guide RNA
cagugccggugccucucaggca

SEQ ID NO: 37239 - RNA, 22 nt, Artificial Sequence
  GATA2 Guide RNA
caucccuccuggugaggauugg

SEQ ID NO: 37240 - RNA, 22 nt, Artificial Sequence
  GATA2 Guide RNA
ccaaauccccugcuuccaaucc

SEQ ID NO: 37241 - RNA, 22 nt, Artificial Sequence
  GATA2 Guide RNA
ccaaccgugugccugagaggca

SEQ ID NO: 37242 - RNA, 22 nt, Artificial Sequence
  GATA2 Guide RNA
ccaauccucaccaggagggaug

SEQ ID NO: 37243 - RNA, 22 nt, Artificial Sequence
  GATA2 Guide RNA
ccagaacgccuggggcccuggg

SEQ ID NO: 37244 - RNA, 22 nt, Artificial Sequence
  GATA2 Guide RNA
ccagagucguuuaaagccaaau

SEQ ID NO: 37245 - RNA, 22 nt, Artificial Sequence
  GATA2 Guide RNA
ccagccgagcagugccggugcc

SEQ ID NO: 37246 - RNA, 22 nt, Artificial Sequence
  GATA2 Guide RNA
ccaggagggauggaaacgaagg

SEQ ID NO: 37247 - RNA, 22 nt, Artificial Sequence
  GATA2 Guide RNA
ccaggaggguauuuacugcaaa

SEQ ID NO: 37248 - RNA, 22 nt, Artificial Sequence
  GATA2 Guide RNA
ccaggccaaccgugugccugag

SEQ ID NO: 37249 - RNA, 22 nt, Artificial Sequence
  GATA2 Guide RNA
ccaggcccaggccaaccgugug

SEQ ID NO: 37250 - RNA, 22 nt, Artificial Sequence
  GATA2 Guide RNA
ccaggcguucuggagcaaccag

SEQ ID NO: 37251 - RNA, 22 nt, Artificial Sequence
  GATA2 Guide RNA
ccaggcuguugcagccaggccc

SEQ ID NO: 37252 - RNA, 22 nt, Artificial Sequence
  GATA2 Guide RNA
ccagggcaggaaagcagccagc

SEQ ID NO: 37253 - RNA, 22 nt, Artificial Sequence
  GATA2 Guide RNA
ccagggccccaggcguucugga

SEQ ID NO: 37254 - RNA, 22 nt, Artificial Sequence
  GATA2 Guide RNA
ccaucccuccuggugaggauug

SEQ ID NO: 37255 - RNA, 22 nt, Artificial Sequence
  GATA2 Guide RNA
cccaggccaaccgugugccuga

SEQ ID NO: 37256 - RNA, 22 nt, Artificial Sequence
  GATA2 Guide RNA
cccaggcguucuggagcaacca

SEQ ID NO: 37257 - RNA, 22 nt, Artificial Sequence
  GATA2 Guide RNA
cccaggcuguugcagccaggcc

SEQ ID NO: 37258 - RNA, 22 nt, Artificial Sequence
  GATA2 Guide RNA
cccagggccccaggcguucugg

SEQ ID NO: 37259 - RNA, 22 nt, Artificial Sequence
  GATA2 Guide RNA
ccccaggcguucuggagcaacc

SEQ ID NO: 37260 - RNA, 22 nt, Artificial Sequence
  GATA2 Guide RNA
ccccuccuccccuccuccuucg

SEQ ID NO: 37261 - RNA, 22 nt, Artificial Sequence
  GATA2 Guide RNA
ccccuccuccuucguuuccauc

SEQ ID NO: 37262 - RNA, 22 nt, Artificial Sequence
  GATA2 Guide RNA
ccccugcuuccaauccucacca

SEQ ID NO: 37263 - RNA, 22 nt, Artificial Sequence
  GATA2 Guide RNA
cccgagaacuugccgguuaagc

SEQ ID NO: 37264 - RNA, 22 nt, Artificial Sequence
  GATA2 Guide RNA
cccucccgagaacuugccgguu

SEQ ID NO: 37265 - RNA, 22 nt, Artificial Sequence
  GATA2 Guide RNA
cccuccuccccuccuccuucgu

SEQ ID NO: 37266 - RNA, 22 nt, Artificial Sequence
  GATA2 Guide RNA
cccuccuccuucguuuccaucc

SEQ ID NO: 37267 - RNA, 22 nt, Artificial Sequence
  GATA2 Guide RNA
cccuccuggugaggauuggaag

SEQ ID NO: 37268 - RNA, 22 nt, Artificial Sequence
  GATA2 Guide RNA
cccuccugguugcuccagaacg

SEQ ID NO: 37269 - RNA, 22 nt, Artificial Sequence
  GATA2 Guide RNA
cccucuuccugcccaggcuguu

SEQ ID NO: 37270 - RNA, 22 nt, Artificial Sequence
  GATA2 Guide RNA
cccugcuuccaauccucaccag

SEQ ID NO: 37271 - RNA, 22 nt, Artificial Sequence
  GATA2 Guide RNA
cccuggacucccucccgagaac

SEQ ID NO: 37272 - RNA, 22 nt, Artificial Sequence
  GATA2 Guide RNA
ccgagaacuugccgguuaagca

SEQ ID NO: 37273 - RNA, 22 nt, Artificial Sequence
  GATA2 Guide RNA
ccgagcagugccggugccucuc

SEQ ID NO: 37274 - RNA, 22 nt, Artificial Sequence
  GATA2 Guide RNA
ccggcaaguucucgggagggag

SEQ ID NO: 37275 - RNA, 22 nt, Artificial Sequence
  GATA2 Guide RNA
ccggcacugcucggcuggcugc

SEQ ID NO: 37276 - RNA, 22 nt, Artificial Sequence
  GATA2 Guide RNA
ccggugccucucaggcacacgg

SEQ ID NO: 37277 - RNA, 22 nt, Artificial Sequence
  GATA2 Guide RNA
ccgugugccugagaggcaccgg

SEQ ID NO: 37278 - RNA, 22 nt, Artificial Sequence
  GATA2 Guide RNA
ccucaccaggagggauggaaac

SEQ ID NO: 37279 - RNA, 22 nt, Artificial Sequence
  GATA2 Guide RNA
ccuccccuccuccuucguuucc

SEQ ID NO: 37280 - RNA, 22 nt, Artificial Sequence
  GATA2 Guide RNA
ccucccgagaacuugccgguua

SEQ ID NO: 37281 - RNA, 22 nt, Artificial Sequence
  GATA2 Guide RNA
ccuccuccccuccuccuucguu

SEQ ID NO: 37282 - RNA, 22 nt, Artificial Sequence
  GATA2 Guide RNA
ccuccuccuucguuuccauccc

SEQ ID NO: 37283 - RNA, 22 nt, Artificial Sequence
  GATA2 Guide RNA
ccuccuggugaggauuggaagc

SEQ ID NO: 37284 - RNA, 22 nt, Artificial Sequence
  GATA2 Guide RNA
ccuccugguugcuccagaacgc

SEQ ID NO: 37285 - RNA, 22 nt, Artificial Sequence
  GATA2 Guide RNA
ccuccuucguuuccaucccucc

SEQ ID NO: 37286 - RNA, 22 nt, Artificial Sequence
  GATA2 Guide RNA
ccucucaggcacacgguuggcc

SEQ ID NO: 37287 - RNA, 22 nt, Artificial Sequence
  GATA2 Guide RNA
ccucuuccugcccaggcuguug

SEQ ID NO: 37288 - RNA, 22 nt, Artificial Sequence
  GATA2 Guide RNA
ccugagaggcaccggcacugcu

SEQ ID NO: 37289 - RNA, 22 nt, Artificial Sequence
  GATA2 Guide RNA
ccugcccaggcuguugcagcca

SEQ ID NO: 37290 - RNA, 22 nt, Artificial Sequence
  GATA2 Guide RNA
ccugcccuggacucccucccga

SEQ ID NO: 37291 - RNA, 22 nt, Artificial Sequence
  GATA2 Guide RNA
ccugcuuaaccggcaaguucuc

SEQ ID NO: 37292 - RNA, 22 nt, Artificial Sequence
  GATA2 Guide RNA
ccugcuuccaauccucaccagg

SEQ ID NO: 37293 - RNA, 22 nt, Artificial Sequence
  GATA2 Guide RNA
ccuggacucccucccgagaacu

SEQ ID NO: 37294 - RNA, 22 nt, Artificial Sequence
  GATA2 Guide RNA
ccuggcugcaacagccugggca

SEQ ID NO: 37295 - RNA, 22 nt, Artificial Sequence
  GATA2 Guide RNA
ccugggccccuccuccccuccu

SEQ ID NO: 37296 - RNA, 22 nt, Artificial Sequence
  GATA2 Guide RNA
ccugggccuggcugcaacagcc

SEQ ID NO: 37297 - RNA, 22 nt, Artificial Sequence
  GATA2 Guide RNA
ccuggugaggauuggaagcagg

SEQ ID NO: 37298 - RNA, 22 nt, Artificial Sequence
  GATA2 Guide RNA
ccugguugcuccagaacgccug

SEQ ID NO: 37299 - RNA, 22 nt, Artificial Sequence
  GATA2 Guide RNA
ccuucguuuccaucccuccugg

SEQ ID NO: 37300 - RNA, 22 nt, Artificial Sequence
  GATA2 Guide RNA
cgaaggaggaggggaggagggg

SEQ ID NO: 37301 - RNA, 22 nt, Artificial Sequence
  GATA2 Guide RNA
cgagaacuugccgguuaagcag

SEQ ID NO: 37302 - RNA, 22 nt, Artificial Sequence
  GATA2 Guide RNA
cgagcagugccggugccucuca

SEQ ID NO: 37303 - RNA, 22 nt, Artificial Sequence
  GATA2 Guide RNA
cggcaaguucucgggagggagu

SEQ ID NO: 37304 - RNA, 22 nt, Artificial Sequence
  GATA2 Guide RNA
cggcacugcucggcuggcugcu

SEQ ID NO: 37305 - RNA, 22 nt, Artificial Sequence
  GATA2 Guide RNA
cggcuggcugcuuuccugcccu

SEQ ID NO: 37306 - RNA, 22 nt, Artificial Sequence
  GATA2 Guide RNA
cgggagggaguccagggcagga

SEQ ID NO: 37307 - RNA, 22 nt, Artificial Sequence
  GATA2 Guide RNA
cgggggccugcuuaaccggcaa

SEQ ID NO: 37308 - RNA, 22 nt, Artificial Sequence
  GATA2 Guide RNA
cggugccucucaggcacacggu

SEQ ID NO: 37309 - RNA, 22 nt, Artificial Sequence
  GATA2 Guide RNA
cgguuggccugggccuggcugc

SEQ ID NO: 37310 - RNA, 22 nt, Artificial Sequence
  GATA2 Guide RNA
cgucccucuuccugcccaggcu

SEQ ID NO: 37311 - RNA, 22 nt, Artificial Sequence
  GATA2 Guide RNA
cgugugccugagaggcaccggc

SEQ ID NO: 37312 - RNA, 22 nt, Artificial Sequence
  GATA2 Guide RNA
cguucuggagcaaccaggaggg

SEQ ID NO: 37313 - RNA, 22 nt, Artificial Sequence
  GATA2 Guide RNA
cguuuaaagccaaauccccugc

SEQ ID NO: 37314 - RNA, 22 nt, Artificial Sequence
  GATA2 Guide RNA
cguuuccaucccuccuggugag

SEQ ID NO: 37315 - RNA, 22 nt, Artificial Sequence
  GATA2 Guide RNA
cucaccaggagggauggaaacg

SEQ ID NO: 37316 - RNA, 22 nt, Artificial Sequence
  GATA2 Guide RNA
cucaggcacacgguuggccugg

SEQ ID NO: 37317 - RNA, 22 nt, Artificial Sequence
  GATA2 Guide RNA
cuccagaacgccuggggcccug

SEQ ID NO: 37318 - RNA, 22 nt, Artificial Sequence
  GATA2 Guide RNA
cuccccuccuccuucguuucca

SEQ ID NO: 37319 - RNA, 22 nt, Artificial Sequence
  GATA2 Guide RNA
cucccgagaacuugccgguuaa

SEQ ID NO: 37320 - RNA, 22 nt, Artificial Sequence
  GATA2 Guide RNA
cucccucccgagaacuugccgg

SEQ ID NO: 37321 - RNA, 22 nt, Artificial Sequence
  GATA2 Guide RNA
cuccuccccuccuccuucguuu

SEQ ID NO: 37322 - RNA, 22 nt, Artificial Sequence
  GATA2 Guide RNA
cuccuccuucguuuccaucccu

SEQ ID NO: 37323 - RNA, 22 nt, Artificial Sequence
  GATA2 Guide RNA
cuccuggugaggauuggaagca

SEQ ID NO: 37324 - RNA, 22 nt, Artificial Sequence
  GATA2 Guide RNA
cuccugguugcuccagaacgcc

SEQ ID NO: 37325 - RNA, 22 nt, Artificial Sequence
  GATA2 Guide RNA
cuccuucguuuccaucccuccu

SEQ ID NO: 37326 - RNA, 22 nt, Artificial Sequence
  GATA2 Guide RNA
cucggcuggcugcuuuccugcc

SEQ ID NO: 37327 - RNA, 22 nt, Artificial Sequence
  GATA2 Guide RNA
cucgggagggaguccagggcag

SEQ ID NO: 37328 - RNA, 22 nt, Artificial Sequence
  GATA2 Guide RNA
cucucaggcacacgguuggccu

SEQ ID NO: 37329 - RNA, 22 nt, Artificial Sequence
  GATA2 Guide RNA
cucuuccugcccaggcuguugc

SEQ ID NO: 37330 - RNA, 22 nt, Artificial Sequence
  GATA2 Guide RNA
cugagaggcaccggcacugcuc

SEQ ID NO: 37331 - RNA, 22 nt, Artificial Sequence
  GATA2 Guide RNA
cugcaacagccugggcaggaag

SEQ ID NO: 37332 - RNA, 22 nt, Artificial Sequence
  GATA2 Guide RNA
cugcccaggcuguugcagccag

SEQ ID NO: 37333 - RNA, 22 nt, Artificial Sequence
  GATA2 Guide RNA
cugcccuggacucccucccgag

SEQ ID NO: 37334 - RNA, 22 nt, Artificial Sequence
  GATA2 Guide RNA
cugcucggcuggcugcuuuccu

SEQ ID NO: 37335 - RNA, 22 nt, Artificial Sequence
  GATA2 Guide RNA
cugcuuaaccggcaaguucucg

SEQ ID NO: 37336 - RNA, 22 nt, Artificial Sequence
  GATA2 Guide RNA
cugcuuccaauccucaccagga

SEQ ID NO: 37337 - RNA, 22 nt, Artificial Sequence
  GATA2 Guide RNA
cugcuuuccugcccuggacucc

SEQ ID NO: 37338 - RNA, 22 nt, Artificial Sequence
  GATA2 Guide RNA
cuggacucccucccgagaacuu

SEQ ID NO: 37339 - RNA, 22 nt, Artificial Sequence
  GATA2 Guide RNA
cuggagcaaccaggaggguauu

SEQ ID NO: 37340 - RNA, 22 nt, Artificial Sequence
  GATA2 Guide RNA
cuggcugcaacagccugggcag

SEQ ID NO: 37341 - RNA, 22 nt, Artificial Sequence
  GATA2 Guide RNA
cuggcugcuuuccugcccugga

SEQ ID NO: 37342 - RNA, 22 nt, Artificial Sequence
  GATA2 Guide RNA
cugggccccuccuccccuccuc

SEQ ID NO: 37343 - RNA, 22 nt, Artificial Sequence
  GATA2 Guide RNA
cugggccuggcugcaacagccu

SEQ ID NO: 37344 - RNA, 22 nt, Artificial Sequence
  GATA2 Guide RNA
cuggugaggauuggaagcaggg

SEQ ID NO: 37345 - RNA, 22 nt, Artificial Sequence
  GATA2 Guide RNA
cugguugcuccagaacgccugg

SEQ ID NO: 37346 - RNA, 22 nt, Artificial Sequence
  GATA2 Guide RNA
cuguugcagccaggcccaggcc

SEQ ID NO: 37347 - RNA, 22 nt, Artificial Sequence
  GATA2 Guide RNA
cuuaaccggcaaguucucggga

SEQ ID NO: 37348 - RNA, 22 nt, Artificial Sequence
  GATA2 Guide RNA
cuuccaauccucaccaggaggg

SEQ ID NO: 37349 - RNA, 22 nt, Artificial Sequence
  GATA2 Guide RNA
cuuccugcccaggcuguugcag

SEQ ID NO: 37350 - RNA, 22 nt, Artificial Sequence
  GATA2 Guide RNA
cuucguuuccaucccuccuggu

SEQ ID NO: 37351 - RNA, 22 nt, Artificial Sequence
  GATA2 Guide RNA
cuugccgguuaagcaggccccc

SEQ ID NO: 37352 - RNA, 22 nt, Artificial Sequence
  GATA2 Guide RNA
cuuuccugcccuggacucccuc

SEQ ID NO: 37353 - RNA, 22 nt, Artificial Sequence
  GATA2 Guide RNA
gaaacgaaggaggaggggagga

SEQ ID NO: 37354 - RNA, 22 nt, Artificial Sequence
  GATA2 Guide RNA
gaaagcagccagccgagcagug

SEQ ID NO: 37355 - RNA, 22 nt, Artificial Sequence
  GATA2 Guide RNA
gaacuugccgguuaagcaggcc

SEQ ID NO: 37356 - RNA, 22 nt, Artificial Sequence
  GATA2 Guide RNA
gaagcaggggauuuggcuuuaa

SEQ ID NO: 37357 - RNA, 22 nt, Artificial Sequence
  GATA2 Guide RNA
gaaggaggaggggaggaggggc

SEQ ID NO: 37358 - RNA, 22 nt, Artificial Sequence
  GATA2 Guide RNA
gacacgggggccugcuuaaccg

SEQ ID NO: 37359 - RNA, 22 nt, Artificial Sequence
  GATA2 Guide RNA
gacucccucccgagaacuugcc

SEQ ID NO: 37360 - RNA, 22 nt, Artificial Sequence
  GATA2 Guide RNA
gagaacuugccgguuaagcagg

SEQ ID NO: 37361 - RNA, 22 nt, Artificial Sequence
  GATA2 Guide RNA
gagaggcaccggcacugcucgg

SEQ ID NO: 37362 - RNA, 22 nt, Artificial Sequence
  GATA2 Guide RNA
gagcaaccaggaggguauuuac

SEQ ID NO: 37363 - RNA, 22 nt, Artificial Sequence
  GATA2 Guide RNA
gagcagugccggugccucucag

SEQ ID NO: 37364 - RNA, 22 nt, Artificial Sequence
  GATA2 Guide RNA
gaggaggggaggaggggcccag

SEQ ID NO: 37365 - RNA, 22 nt, Artificial Sequence
  GATA2 Guide RNA
gaggauuggaagcaggggauuu

SEQ ID NO: 37366 - RNA, 22 nt, Artificial Sequence
  GATA2 Guide RNA
gaggcaccggcacugcucggcu

SEQ ID NO: 37367 - RNA, 22 nt, Artificial Sequence
  GATA2 Guide RNA
gagggaguccagggcaggaaag

SEQ ID NO: 37368 - RNA, 22 nt, Artificial Sequence
  GATA2 Guide RNA
gagggauggaaacgaaggagga

SEQ ID NO: 37369 - RNA, 22 nt, Artificial Sequence
  GATA2 Guide RNA
gagggucucccacaugggaggg

SEQ ID NO: 37370 - RNA, 22 nt, Artificial Sequence
  GATA2 Guide RNA
gaguccagggcaggaaagcagc

SEQ ID NO: 37371 - RNA, 22 nt, Artificial Sequence
  GATA2 Guide RNA
gagucguuuaaagccaaauccc

SEQ ID NO: 37372 - RNA, 22 nt, Artificial Sequence
  GATA2 Guide RNA
gauggaaacgaaggaggagggg

SEQ ID NO: 37373 - RNA, 22 nt, Artificial Sequence
  GATA2 Guide RNA
gauuggaagcaggggauuuggc

SEQ ID NO: 37374 - RNA, 22 nt, Artificial Sequence
  GATA2 Guide RNA
gauuuggcuuuaaacgacucug

SEQ ID NO: 37375 - RNA, 22 nt, Artificial Sequence
  GATA2 Guide RNA
gcaacagccugggcaggaagag

SEQ ID NO: 37376 - RNA, 22 nt, Artificial Sequence
  GATA2 Guide RNA
gcaaccaggaggguauuuacug

SEQ ID NO: 37377 - RNA, 22 nt, Artificial Sequence
  GATA2 Guide RNA
gcaaguucucgggagggagucc

SEQ ID NO: 37378 - RNA, 22 nt, Artificial Sequence
  GATA2 Guide RNA
gcacacgguuggccugggccug

SEQ ID NO: 37379 - RNA, 22 nt, Artificial Sequence
  GATA2 Guide RNA
gcaccggcacugcucggcuggc

SEQ ID NO: 37380 - RNA, 22 nt, Artificial Sequence
  GATA2 Guide RNA
gcacugcucggcuggcugcuuu

SEQ ID NO: 37381 - RNA, 22 nt, Artificial Sequence
  GATA2 Guide RNA
gcagccagccgagcagugccgg

SEQ ID NO: 37382 - RNA, 22 nt, Artificial Sequence
  GATA2 Guide RNA
gcagccaggcccaggccaaccg

SEQ ID NO: 37383 - RNA, 22 nt, Artificial Sequence
  GATA2 Guide RNA
gcaggaaagcagccagccgagc

SEQ ID NO: 37384 - RNA, 22 nt, Artificial Sequence
  GATA2 Guide RNA
gcaggggauuuggcuuuaaacg

SEQ ID NO: 37385 - RNA, 22 nt, Artificial Sequence
  GATA2 Guide RNA
gcaguaaauacccuccugguug

SEQ ID NO: 37386 - RNA, 22 nt, Artificial Sequence
  GATA2 Guide RNA
gcagugccggugccucucaggc

SEQ ID NO: 37387 - RNA, 22 nt, Artificial Sequence
  GATA2 Guide RNA
gccaaauccccugcuuccaauc

SEQ ID NO: 37388 - RNA, 22 nt, Artificial Sequence
  GATA2 Guide RNA
gccaaccgugugccugagaggc

SEQ ID NO: 37389 - RNA, 22 nt, Artificial Sequence
  GATA2 Guide RNA
gccagccgagcagugccggugc

SEQ ID NO: 37390 - RNA, 22 nt, Artificial Sequence
  GATA2 Guide RNA
gccaggcccaggccaaccgugu

SEQ ID NO: 37391 - RNA, 22 nt, Artificial Sequence
  GATA2 Guide RNA
gcccaggccaaccgugugccug

SEQ ID NO: 37392 - RNA, 22 nt, Artificial Sequence
  GATA2 Guide RNA
gcccaggcuguugcagccaggc

SEQ ID NO: 37393 - RNA, 22 nt, Artificial Sequence
  GATA2 Guide RNA
gcccagggccccaggcguucug

SEQ ID NO: 37394 - RNA, 22 nt, Artificial Sequence
  GATA2 Guide RNA
gccccaggcguucuggagcaac

SEQ ID NO: 37395 - RNA, 22 nt, Artificial Sequence
  GATA2 Guide RNA
gcccccucccaugugggagacc

SEQ ID NO: 37396 - RNA, 22 nt, Artificial Sequence
  GATA2 Guide RNA
gccccuccuccccuccuccuuc

SEQ ID NO: 37397 - RNA, 22 nt, Artificial Sequence
  GATA2 Guide RNA
gcccuggacucccucccgagaa

SEQ ID NO: 37398 - RNA, 22 nt, Artificial Sequence
  GATA2 Guide RNA
gccgagcagugccggugccucu

SEQ ID NO: 37399 - RNA, 22 nt, Artificial Sequence
  GATA2 Guide RNA
gccggugccucucaggcacacg

SEQ ID NO: 37400 - RNA, 22 nt, Artificial Sequence
  GATA2 Guide RNA
gccucucaggcacacgguuggc

SEQ ID NO: 37401 - RNA, 22 nt, Artificial Sequence
  GATA2 Guide RNA
gccugagaggcaccggcacugc

SEQ ID NO: 37402 - RNA, 22 nt, Artificial Sequence
  GATA2 Guide RNA
gccugcuuaaccggcaaguucu

SEQ ID NO: 37403 - RNA, 22 nt, Artificial Sequence
  GATA2 Guide RNA
gccuggcugcaacagccugggc

SEQ ID NO: 37404 - RNA, 22 nt, Artificial Sequence
  GATA2 Guide RNA
gccugggccuggcugcaacagc

SEQ ID NO: 37405 - RNA, 22 nt, Artificial Sequence
  GATA2 Guide RNA
gcguucuggagcaaccaggagg

SEQ ID NO: 37406 - RNA, 22 nt, Artificial Sequence
  GATA2 Guide RNA
gcuccagaacgccuggggcccu

SEQ ID NO: 37407 - RNA, 22 nt, Artificial Sequence
  GATA2 Guide RNA
gcucggcuggcugcuuuccugc

SEQ ID NO: 37408 - RNA, 22 nt, Artificial Sequence
  GATA2 Guide RNA
gcugcaacagccugggcaggaa

SEQ ID NO: 37409 - RNA, 22 nt, Artificial Sequence
  GATA2 Guide RNA
gcugcuuuccugcccuggacuc

SEQ ID NO: 37410 - RNA, 22 nt, Artificial Sequence
  GATA2 Guide RNA
gcuggcugcuuuccugcccugg

SEQ ID NO: 37411 - RNA, 22 nt, Artificial Sequence
  GATA2 Guide RNA
gcuguugcagccaggcccaggc

SEQ ID NO: 37412 - RNA, 22 nt, Artificial Sequence
  GATA2 Guide RNA
gcuuaaccggcaaguucucggg

SEQ ID NO: 37413 - RNA, 22 nt, Artificial Sequence
  GATA2 Guide RNA
gcuuccaauccucaccaggagg

SEQ ID NO: 37414 - RNA, 22 nt, Artificial Sequence
  GATA2 Guide RNA
gcuuuccugcccuggacucccu

SEQ ID NO: 37415 - RNA, 22 nt, Artificial Sequence
  GATA2 Guide RNA
ggaaacgaaggaggaggggagg

SEQ ID NO: 37416 - RNA, 22 nt, Artificial Sequence
  GATA2 Guide RNA
ggaaagcagccagccgagcagu

SEQ ID NO: 37417 - RNA, 22 nt, Artificial Sequence
  GATA2 Guide RNA
ggaagcaggggauuuggcuuua

SEQ ID NO: 37418 - RNA, 22 nt, Artificial Sequence
  GATA2 Guide RNA
ggacucccucccgagaacuugc

SEQ ID NO: 37419 - RNA, 22 nt, Artificial Sequence
  GATA2 Guide RNA
ggagcaaccaggaggguauuua

SEQ ID NO: 37420 - RNA, 22 nt, Artificial Sequence
  GATA2 Guide RNA
ggaggaggggaggaggggccca

SEQ ID NO: 37421 - RNA, 22 nt, Artificial Sequence
  GATA2 Guide RNA
ggagggaguccagggcaggaaa

SEQ ID NO: 37422 - RNA, 22 nt, Artificial Sequence
  GATA2 Guide RNA
ggagggauggaaacgaaggagg

SEQ ID NO: 37423 - RNA, 22 nt, Artificial Sequence
  GATA2 Guide RNA
ggaguccagggcaggaaagcag

SEQ ID NO: 37424 - RNA, 22 nt, Artificial Sequence
  GATA2 Guide RNA
ggauggaaacgaaggaggaggg

SEQ ID NO: 37425 - RNA, 22 nt, Artificial Sequence
  GATA2 Guide RNA
ggauuggaagcaggggauuugg

SEQ ID NO: 37426 - RNA, 22 nt, Artificial Sequence
  GATA2 Guide RNA
ggauuuggcuuuaaacgacucu

SEQ ID NO: 37427 - RNA, 22 nt, Artificial Sequence
  GATA2 Guide RNA
ggcaaguucucgggagggaguc

SEQ ID NO: 37428 - RNA, 22 nt, Artificial Sequence
  GATA2 Guide RNA
ggcacacgguuggccugggccu

SEQ ID NO: 37429 - RNA, 22 nt, Artificial Sequence
  GATA2 Guide RNA
ggcaccggcacugcucggcugg

SEQ ID NO: 37430 - RNA, 22 nt, Artificial Sequence
  GATA2 Guide RNA
ggcacugcucggcuggcugcuu

SEQ ID NO: 37431 - RNA, 22 nt, Artificial Sequence
  GATA2 Guide RNA
ggcaggaaagcagccagccgag

SEQ ID NO: 37432 - RNA, 22 nt, Artificial Sequence
  GATA2 Guide RNA
ggccaaccgugugccugagagg

SEQ ID NO: 37433 - RNA, 22 nt, Artificial Sequence
  GATA2 Guide RNA
ggcccaggccaaccgugugccu

SEQ ID NO: 37434 - RNA, 22 nt, Artificial Sequence
  GATA2 Guide RNA
ggcccagggccccaggcguucu

SEQ ID NO: 37435 - RNA, 22 nt, Artificial Sequence
  GATA2 Guide RNA
ggccccaggcguucuggagcaa

SEQ ID NO: 37436 - RNA, 22 nt, Artificial Sequence
  GATA2 Guide RNA
ggccccuccuccccuccuccuu

SEQ ID NO: 37437 - RNA, 22 nt, Artificial Sequence
  GATA2 Guide RNA
ggccugcuuaaccggcaaguuc

SEQ ID NO: 37438 - RNA, 22 nt, Artificial Sequence
  GATA2 Guide RNA
ggccuggcugcaacagccuggg

SEQ ID NO: 37439 - RNA, 22 nt, Artificial Sequence
  GATA2 Guide RNA
ggccugggccuggcugcaacag

SEQ ID NO: 37440 - RNA, 22 nt, Artificial Sequence
  GATA2 Guide RNA
ggcguucuggagcaaccaggag

SEQ ID NO: 37441 - RNA, 22 nt, Artificial Sequence
  GATA2 Guide RNA
ggcugcaacagccugggcagga

SEQ ID NO: 37442 - RNA, 22 nt, Artificial Sequence
  GATA2 Guide RNA
ggcugcuuuccugcccuggacu

SEQ ID NO: 37443 - RNA, 22 nt, Artificial Sequence
  GATA2 Guide RNA
ggcuggcugcuuuccugcccug

SEQ ID NO: 37444 - RNA, 22 nt, Artificial Sequence
  GATA2 Guide RNA
ggcuguugcagccaggcccagg

SEQ ID NO: 37445 - RNA, 22 nt, Artificial Sequence
  GATA2 Guide RNA
gggagggaguccagggcaggaa

SEQ ID NO: 37446 - RNA, 22 nt, Artificial Sequence
  GATA2 Guide RNA
gggaguccagggcaggaaagca

SEQ ID NO: 37447 - RNA, 22 nt, Artificial Sequence
  GATA2 Guide RNA
gggauggaaacgaaggaggagg

SEQ ID NO: 37448 - RNA, 22 nt, Artificial Sequence
  GATA2 Guide RNA
gggauuuggcuuuaaacgacuc

SEQ ID NO: 37449 - RNA, 22 nt, Artificial Sequence
  GATA2 Guide RNA
gggcaggaaagcagccagccga

SEQ ID NO: 37450 - RNA, 22 nt, Artificial Sequence
  GATA2 Guide RNA
gggccccaggcguucuggagca

SEQ ID NO: 37451 - RNA, 22 nt, Artificial Sequence
  GATA2 Guide RNA
gggccccuccuccccuccuccu

SEQ ID NO: 37452 - RNA, 22 nt, Artificial Sequence
  GATA2 Guide RNA
gggccugcuuaaccggcaaguu

SEQ ID NO: 37453 - RNA, 22 nt, Artificial Sequence
  GATA2 Guide RNA
gggccuggcugcaacagccugg

SEQ ID NO: 37454 - RNA, 22 nt, Artificial Sequence
  GATA2 Guide RNA
ggggauuuggcuuuaaacgacu

SEQ ID NO: 37455 - RNA, 22 nt, Artificial Sequence
  GATA2 Guide RNA
ggggccugcuuaaccggcaagu

SEQ ID NO: 37456 - RNA, 22 nt, Artificial Sequence
  GATA2 Guide RNA
gggggccugcuuaaccggcaag

SEQ ID NO: 37457 - RNA, 22 nt, Artificial Sequence
  GATA2 Guide RNA
gggucucccacaugggaggggg

SEQ ID NO: 37458 - RNA, 22 nt, Artificial Sequence
  GATA2 Guide RNA
gguccagagucguuuaaagcca

SEQ ID NO: 37459 - RNA, 22 nt, Artificial Sequence
  GATA2 Guide RNA
ggugaggauuggaagcagggga

SEQ ID NO: 37460 - RNA, 22 nt, Artificial Sequence
  GATA2 Guide RNA
ggugccucucaggcacacgguu

SEQ ID NO: 37461 - RNA, 22 nt, Artificial Sequence
  GATA2 Guide RNA
gguugcuccagaacgccugggg

SEQ ID NO: 37462 - RNA, 22 nt, Artificial Sequence
  GATA2 Guide RNA
gguuggccugggccuggcugca

SEQ ID NO: 37463 - RNA, 22 nt, Artificial Sequence
  GATA2 Guide RNA
guaaauacccuccugguugcuc

SEQ ID NO: 37464 - RNA, 22 nt, Artificial Sequence
  GATA2 Guide RNA
guccagagucguuuaaagccaa

SEQ ID NO: 37465 - RNA, 22 nt, Artificial Sequence
  GATA2 Guide RNA
guccagggcaggaaagcagcca

SEQ ID NO: 37466 - RNA, 22 nt, Artificial Sequence
  GATA2 Guide RNA
gucccucuuccugcccaggcug

SEQ ID NO: 37467 - RNA, 22 nt, Artificial Sequence
  GATA2 Guide RNA
gucguuuaaagccaaauccccu

SEQ ID NO: 37468 - RNA, 22 nt, Artificial Sequence
  GATA2 Guide RNA
gugaggauuggaagcaggggau

SEQ ID NO: 37469 - RNA, 22 nt, Artificial Sequence
  GATA2 Guide RNA
gugcccccucccaugugggaga

SEQ ID NO: 37470 - RNA, 22 nt, Artificial Sequence
  GATA2 Guide RNA
gugccggugccucucaggcaca

SEQ ID NO: 37471 - RNA, 22 nt, Artificial Sequence
  GATA2 Guide RNA
gugccucucaggcacacgguug

SEQ ID NO: 37472 - RNA, 22 nt, Artificial Sequence
  GATA2 Guide RNA
gugccugagaggcaccggcacu

SEQ ID NO: 37473 - RNA, 22 nt, Artificial Sequence
  GATA2 Guide RNA
gugugccugagaggcaccggca

SEQ ID NO: 37474 - RNA, 22 nt, Artificial Sequence
  GATA2 Guide RNA
guucucgggagggaguccaggg

SEQ ID NO: 37475 - RNA, 22 nt, Artificial Sequence
  GATA2 Guide RNA
guucuggagcaaccaggagggu

SEQ ID NO: 37476 - RNA, 22 nt, Artificial Sequence
  GATA2 Guide RNA
guugcagccaggcccaggccaa

SEQ ID NO: 37477 - RNA, 22 nt, Artificial Sequence
  GATA2 Guide RNA
guugcuccagaacgccuggggc

SEQ ID NO: 37478 - RNA, 22 nt, Artificial Sequence
  GATA2 Guide RNA
guuggccugggccuggcugcaa

SEQ ID NO: 37479 - RNA, 22 nt, Artificial Sequence
  GATA2 Guide RNA
guuuaaagccaaauccccugcu

SEQ ID NO: 37480 - RNA, 22 nt, Artificial Sequence
  GATA2 Guide RNA
guuuccaucccuccuggugagg

SEQ ID NO: 37481 - RNA, 22 nt, Artificial Sequence
  GATA2 Guide RNA
guuugcaguaaauacccuccug

SEQ ID NO: 37482 - RNA, 22 nt, Artificial Sequence
  GATA2 Guide RNA
uaaagccaaauccccugcuucc

SEQ ID NO: 37483 - RNA, 22 nt, Artificial Sequence
  GATA2 Guide RNA
uaaauacccuccugguugcucc

SEQ ID NO: 37484 - RNA, 22 nt, Artificial Sequence
  GATA2 Guide RNA
uaaccggcaaguucucgggagg

SEQ ID NO: 37485 - RNA, 22 nt, Artificial Sequence
  GATA2 Guide RNA
uacccuccugguugcuccagaa

SEQ ID NO: 37486 - RNA, 22 nt, Artificial Sequence
  GATA2 Guide RNA
ucaccaggagggauggaaacga

SEQ ID NO: 37487 - RNA, 22 nt, Artificial Sequence
  GATA2 Guide RNA
ucaggcacacgguuggccuggg

SEQ ID NO: 37488 - RNA, 22 nt, Artificial Sequence
  GATA2 Guide RNA
uccaauccucaccaggagggau

SEQ ID NO: 37489 - RNA, 22 nt, Artificial Sequence
  GATA2 Guide RNA
uccagaacgccuggggcccugg

SEQ ID NO: 37490 - RNA, 22 nt, Artificial Sequence
  GATA2 Guide RNA
uccagagucguuuaaagccaaa

SEQ ID NO: 37491 - RNA, 22 nt, Artificial Sequence
  GATA2 Guide RNA
uccagggcaggaaagcagccag

SEQ ID NO: 37492 - RNA, 22 nt, Artificial Sequence
  GATA2 Guide RNA
uccaucccuccuggugaggauu

SEQ ID NO: 37493 - RNA, 22 nt, Artificial Sequence
  GATA2 Guide RNA
uccccuccuccuucguuuccau

SEQ ID NO: 37494 - RNA, 22 nt, Artificial Sequence
  GATA2 Guide RNA
uccccugcuuccaauccucacc

SEQ ID NO: 37495 - RNA, 22 nt, Artificial Sequence
  GATA2 Guide RNA
ucccgagaacuugccgguuaag

SEQ ID NO: 37496 - RNA, 22 nt, Artificial Sequence
  GATA2 Guide RNA
ucccucccgagaacuugccggu

SEQ ID NO: 37497 - RNA, 22 nt, Artificial Sequence
  GATA2 Guide RNA
ucccuccuggugaggauuggaa

SEQ ID NO: 37498 - RNA, 22 nt, Artificial Sequence
  GATA2 Guide RNA
ucccucuuccugcccaggcugu

SEQ ID NO: 37499 - RNA, 22 nt, Artificial Sequence
  GATA2 Guide RNA
uccucaccaggagggauggaaa

SEQ ID NO: 37500 - RNA, 22 nt, Artificial Sequence
  GATA2 Guide RNA
uccuccccuccuccuucguuuc

SEQ ID NO: 37501 - RNA, 22 nt, Artificial Sequence
  GATA2 Guide RNA
uccuccuucguuuccaucccuc

SEQ ID NO: 37502 - RNA, 22 nt, Artificial Sequence
  GATA2 Guide RNA
uccugcccaggcuguugcagcc

SEQ ID NO: 37503 - RNA, 22 nt, Artificial Sequence
  GATA2 Guide RNA
uccugcccuggacucccucccg

SEQ ID NO: 37504 - RNA, 22 nt, Artificial Sequence
  GATA2 Guide RNA
uccuggugaggauuggaagcag

SEQ ID NO: 37505 - RNA, 22 nt, Artificial Sequence
  GATA2 Guide RNA
uccugguugcuccagaacgccu

SEQ ID NO: 37506 - RNA, 22 nt, Artificial Sequence
  GATA2 Guide RNA
uccuucguuuccaucccuccug

SEQ ID NO: 37507 - RNA, 22 nt, Artificial Sequence
  GATA2 Guide RNA
ucggcuggcugcuuuccugccc

SEQ ID NO: 37508 - RNA, 22 nt, Artificial Sequence
  GATA2 Guide RNA
ucgggagggaguccagggcagg

SEQ ID NO: 37509 - RNA, 22 nt, Artificial Sequence
  GATA2 Guide RNA
ucguuuaaagccaaauccccug

SEQ ID NO: 37510 - RNA, 22 nt, Artificial Sequence
  GATA2 Guide RNA
ucguuuccaucccuccugguga

SEQ ID NO: 37511 - RNA, 22 nt, Artificial Sequence
  GATA2 Guide RNA
ucucaggcacacgguuggccug

SEQ ID NO: 37512 - RNA, 22 nt, Artificial Sequence
  GATA2 Guide RNA
ucucgggagggaguccagggca

SEQ ID NO: 37513 - RNA, 22 nt, Artificial Sequence
  GATA2 Guide RNA
ucuggagcaaccaggaggguau

SEQ ID NO: 37514 - RNA, 22 nt, Artificial Sequence
  GATA2 Guide RNA
ucuuccugcccaggcuguugca

SEQ ID NO: 37515 - RNA, 22 nt, Artificial Sequence
  GATA2 Guide RNA
ugagaggcaccggcacugcucg

SEQ ID NO: 37516 - RNA, 22 nt, Artificial Sequence
  GATA2 Guide RNA
ugaggauuggaagcaggggauu

SEQ ID NO: 37517 - RNA, 22 nt, Artificial Sequence
  GATA2 Guide RNA
ugcaacagccugggcaggaaga

SEQ ID NO: 37518 - RNA, 22 nt, Artificial Sequence
  GATA2 Guide RNA
ugcagccaggcccaggccaacc

SEQ ID NO: 37519 - RNA, 22 nt, Artificial Sequence
  GATA2 Guide RNA
ugcaguaaauacccuccugguu

SEQ ID NO: 37520 - RNA, 22 nt, Artificial Sequence
  GATA2 Guide RNA
ugcccaggcuguugcagccagg

SEQ ID NO: 37521 - RNA, 22 nt, Artificial Sequence
  GATA2 Guide RNA
ugcccccucccaugugggagac

SEQ ID NO: 37522 - RNA, 22 nt, Artificial Sequence
  GATA2 Guide RNA
ugcccuggacucccucccgaga

SEQ ID NO: 37523 - RNA, 22 nt, Artificial Sequence
  GATA2 Guide RNA
ugccggugccucucaggcacac

SEQ ID NO: 37524 - RNA, 22 nt, Artificial Sequence
  GATA2 Guide RNA
ugccgguuaagcaggcccccgu

SEQ ID NO: 37525 - RNA, 22 nt, Artificial Sequence
  GATA2 Guide RNA
ugccucucaggcacacgguugg

SEQ ID NO: 37526 - RNA, 22 nt, Artificial Sequence
  GATA2 Guide RNA
ugccugagaggcaccggcacug

SEQ ID NO: 37527 - RNA, 22 nt, Artificial Sequence
  GATA2 Guide RNA
ugcuccagaacgccuggggccc

SEQ ID NO: 37528 - RNA, 22 nt, Artificial Sequence
  GATA2 Guide RNA
ugcucggcuggcugcuuuccug

SEQ ID NO: 37529 - RNA, 22 nt, Artificial Sequence
  GATA2 Guide RNA
ugcuuaaccggcaaguucucgg

SEQ ID NO: 37530 - RNA, 22 nt, Artificial Sequence
  GATA2 Guide RNA
ugcuuccaauccucaccaggag

SEQ ID NO: 37531 - RNA, 22 nt, Artificial Sequence
  GATA2 Guide RNA
ugcuuuccugcccuggacuccc

SEQ ID NO: 37532 - RNA, 22 nt, Artificial Sequence
  GATA2 Guide RNA
uggaaacgaaggaggaggggag

SEQ ID NO: 37533 - RNA, 22 nt, Artificial Sequence
  GATA2 Guide RNA
uggaagcaggggauuuggcuuu

SEQ ID NO: 37534 - RNA, 22 nt, Artificial Sequence
  GATA2 Guide RNA
uggacucccucccgagaacuug

SEQ ID NO: 37535 - RNA, 22 nt, Artificial Sequence
  GATA2 Guide RNA
uggagcaaccaggaggguauuu

SEQ ID NO: 37536 - RNA, 22 nt, Artificial Sequence
  GATA2 Guide RNA
uggccugggccuggcugcaaca

SEQ ID NO: 37537 - RNA, 22 nt, Artificial Sequence
  GATA2 Guide RNA
uggcugcaacagccugggcagg

SEQ ID NO: 37538 - RNA, 22 nt, Artificial Sequence
  GATA2 Guide RNA
uggcugcuuuccugcccuggac

SEQ ID NO: 37539 - RNA, 22 nt, Artificial Sequence
  GATA2 Guide RNA
ugggccccuccuccccuccucc

SEQ ID NO: 37540 - RNA, 22 nt, Artificial Sequence
  GATA2 Guide RNA
ugggccuggcugcaacagccug

SEQ ID NO: 37541 - RNA, 22 nt, Artificial Sequence
  GATA2 Guide RNA
uggugaggauuggaagcagggg

SEQ ID NO: 37542 - RNA, 22 nt, Artificial Sequence
  GATA2 Guide RNA
ugguugcuccagaacgccuggg

SEQ ID NO: 37543 - RNA, 22 nt, Artificial Sequence
  GATA2 Guide RNA
ugugcccccucccaugugggag

SEQ ID NO: 37544 - RNA, 22 nt, Artificial Sequence
  GATA2 Guide RNA
ugugccugagaggcaccggcac

SEQ ID NO: 37545 - RNA, 22 nt, Artificial Sequence
  GATA2 Guide RNA
uguugcagccaggcccaggcca

SEQ ID NO: 37546 - RNA, 22 nt, Artificial Sequence
  GATA2 Guide RNA
uuaaagccaaauccccugcuuc

SEQ ID NO: 37547 - RNA, 22 nt, Artificial Sequence
  GATA2 Guide RNA
uuaaccggcaaguucucgggag

SEQ ID NO: 37548 - RNA, 22 nt, Artificial Sequence
  GATA2 Guide RNA
uuccaauccucaccaggaggga

SEQ ID NO: 37549 - RNA, 22 nt, Artificial Sequence
  GATA2 Guide RNA
uuccaucccuccuggugaggau

SEQ ID NO: 37550 - RNA, 22 nt, Artificial Sequence
  GATA2 Guide RNA
uuccugcccaggcuguugcagc

SEQ ID NO: 37551 - RNA, 22 nt, Artificial Sequence
  GATA2 Guide RNA
uuccugcccuggacucccuccc

SEQ ID NO: 37552 - RNA, 22 nt, Artificial Sequence
  GATA2 Guide RNA
uucguuuccaucccuccuggug

SEQ ID NO: 37553 - RNA, 22 nt, Artificial Sequence
  GATA2 Guide RNA
uucucgggagggaguccagggc

SEQ ID NO: 37554 - RNA, 22 nt, Artificial Sequence
  GATA2 Guide RNA
uucuggagcaaccaggagggua

SEQ ID NO: 37555 - RNA, 22 nt, Artificial Sequence
  GATA2 Guide RNA
uugcagccaggcccaggccaac

SEQ ID NO: 37556 - RNA, 22 nt, Artificial Sequence
  GATA2 Guide RNA
uugcaguaaauacccuccuggu

SEQ ID NO: 37557 - RNA, 22 nt, Artificial Sequence
  GATA2 Guide RNA
uugccgguuaagcaggcccccg

SEQ ID NO: 37558 - RNA, 22 nt, Artificial Sequence
  GATA2 Guide RNA
uugcuccagaacgccuggggcc

SEQ ID NO: 37559 - RNA, 22 nt, Artificial Sequence
  GATA2 Guide RNA
uuggaagcaggggauuuggcuu

SEQ ID NO: 37560 - RNA, 22 nt, Artificial Sequence
  GATA2 Guide RNA
uuggccugggccuggcugcaac

SEQ ID NO: 37561 - RNA, 22 nt, Artificial Sequence
  GATA2 Guide RNA
uuuaaagccaaauccccugcuu

SEQ ID NO: 37562 - RNA, 22 nt, Artificial Sequence
  GATA2 Guide RNA
uuuccaucccuccuggugagga

SEQ ID NO: 37563 - RNA, 22 nt, Artificial Sequence
  GATA2 Guide RNA
uuuccugcccuggacucccucc

SEQ ID NO: 37564 - RNA, 22 nt, Artificial Sequence
  GATA2 Guide RNA
uuugcaguaaauacccuccugg

SEQ ID NO: 37565 - RNA, 20 nt, Artificial Sequence
  GATA2 Guide RNA
aaaaacgcaaaugcuccccu

SEQ ID NO: 37566 - RNA, 20 nt, Artificial Sequence
  GATA2 Guide RNA
aaaacgcaaaugcuccccuc

SEQ ID NO: 37567 - RNA, 20 nt, Artificial Sequence
  GATA2 Guide RNA
aaaaguuuuagagucuccuc

SEQ ID NO: 37568 - RNA, 20 nt, Artificial Sequence
  GATA2 Guide RNA
aaacaucugcugggggcuau

SEQ ID NO: 37569 - RNA, 20 nt, Artificial Sequence
  GATA2 Guide RNA
aaaccaacacugccaccucu

SEQ ID NO: 37570 - RNA, 20 nt, Artificial Sequence
  GATA2 Guide RNA
aaacgcaaaugcuccccucu

SEQ ID NO: 37571 - RNA, 20 nt, Artificial Sequence
  GATA2 Guide RNA
aaagggggaauuccuguucu

SEQ ID NO: 37572 - RNA, 20 nt, Artificial Sequence
  GATA2 Guide RNA
aaaguucaguuccuugcccc

SEQ ID NO: 37573 - RNA, 20 nt, Artificial Sequence
  GATA2 Guide RNA
aaaguuuuagagucuccucu

SEQ ID NO: 37574 - RNA, 20 nt, Artificial Sequence
  GATA2 Guide RNA
aaaugcuccccucuuccacg

SEQ ID NO: 37575 - RNA, 20 nt, Artificial Sequence
  GATA2 Guide RNA
aaauggcaaaaguuuuagag

SEQ ID NO: 37576 - RNA, 20 nt, Artificial Sequence
  GATA2 Guide RNA
aacacugccaccucucccaa

SEQ ID NO: 37577 - RNA, 20 nt, Artificial Sequence
  GATA2 Guide RNA
aacaggaauucccccuuucc

SEQ ID NO: 37578 - RNA, 20 nt, Artificial Sequence
  GATA2 Guide RNA
aacauagaacaggaauuccc

SEQ ID NO: 37579 - RNA, 20 nt, Artificial Sequence
  GATA2 Guide RNA
aacaucugcugggggcuauu

SEQ ID NO: 37580 - RNA, 20 nt, Artificial Sequence
  GATA2 Guide RNA
aaccaacacugccaccucuc

SEQ ID NO: 37581 - RNA, 20 nt, Artificial Sequence
  GATA2 Guide RNA
aacccuggggcaaggaacug

SEQ ID NO: 37582 - RNA, 20 nt, Artificial Sequence
  GATA2 Guide RNA
aacgcaaaugcuccccucuu

SEQ ID NO: 37583 - RNA, 20 nt, Artificial Sequence
  GATA2 Guide RNA
aacugaacuuuggggguaca

SEQ ID NO: 37584 - RNA, 20 nt, Artificial Sequence
  GATA2 Guide RNA
aacuuuggggguacacugga

SEQ ID NO: 37585 - RNA, 20 nt, Artificial Sequence
  GATA2 Guide RNA
aagaggggagcauuugcguu

SEQ ID NO: 37586 - RNA, 20 nt, Artificial Sequence
  GATA2 Guide RNA
aagauucagggagggaaagg

SEQ ID NO: 37587 - RNA, 20 nt, Artificial Sequence
  GATA2 Guide RNA
aagcacuuaagaaaauggca

SEQ ID NO: 37588 - RNA, 20 nt, Artificial Sequence
  GATA2 Guide RNA
aaggaacugaacuuuggggg

SEQ ID NO: 37589 - RNA, 20 nt, Artificial Sequence
  GATA2 Guide RNA
aagggggaauuccuguucua

SEQ ID NO: 37590 - RNA, 20 nt, Artificial Sequence
  GATA2 Guide RNA
aagucacagcuccccaccac

SEQ ID NO: 37591 - RNA, 20 nt, Artificial Sequence
  GATA2 Guide RNA
aagugcuuccaguguacccc

SEQ ID NO: 37592 - RNA, 20 nt, Artificial Sequence
  GATA2 Guide RNA
aaguucaguuccuugcccca

SEQ ID NO: 37593 - RNA, 20 nt, Artificial Sequence
  GATA2 Guide RNA
aaguuuuagagucuccucuc

SEQ ID NO: 37594 - RNA, 20 nt, Artificial Sequence
  GATA2 Guide RNA
aauagcccccagcagauguu

SEQ ID NO: 37595 - RNA, 20 nt, Artificial Sequence
  GATA2 Guide RNA
aaugcuccccucuuccacga

SEQ ID NO: 37596 - RNA, 20 nt, Artificial Sequence
  GATA2 Guide RNA
aauggcaaaaguuuuagagu

SEQ ID NO: 37597 - RNA, 20 nt, Artificial Sequence
  GATA2 Guide RNA
aauucccccuuucccucccu

SEQ ID NO: 37598 - RNA, 20 nt, Artificial Sequence
  GATA2 Guide RNA
aauuccuguucuauguucug

SEQ ID NO: 37599 - RNA, 20 nt, Artificial Sequence
  GATA2 Guide RNA
acaaaaacgcaaaugcuccc

SEQ ID NO: 37600 - RNA, 20 nt, Artificial Sequence
  GATA2 Guide RNA
acacugccaccucucccaag

SEQ ID NO: 37601 - RNA, 20 nt, Artificial Sequence
  GATA2 Guide RNA
acacuggaagcacuuaagaa

SEQ ID NO: 37602 - RNA, 20 nt, Artificial Sequence
  GATA2 Guide RNA
acagcuccccaccacaaaaa

SEQ ID NO: 37603 - RNA, 20 nt, Artificial Sequence
  GATA2 Guide RNA
acaggaauucccccuuuccc

SEQ ID NO: 37604 - RNA, 20 nt, Artificial Sequence
  GATA2 Guide RNA
acauagaacaggaauucccc

SEQ ID NO: 37605 - RNA, 20 nt, Artificial Sequence
  GATA2 Guide RNA
acaucacccauccccagauc

SEQ ID NO: 37606 - RNA, 20 nt, Artificial Sequence
  GATA2 Guide RNA
acaucugcugggggcuauua

SEQ ID NO: 37607 - RNA, 20 nt, Artificial Sequence
  GATA2 Guide RNA
accaacacugccaccucucc

SEQ ID NO: 37608 - RNA, 20 nt, Artificial Sequence
  GATA2 Guide RNA
accaacccuggggcaaggaa

SEQ ID NO: 37609 - RNA, 20 nt, Artificial Sequence
  GATA2 Guide RNA
accacaaaaacgcaaaugcu

SEQ ID NO: 37610 - RNA, 20 nt, Artificial Sequence
  GATA2 Guide RNA
accagaacauagaacaggaa

SEQ ID NO: 37611 - RNA, 20 nt, Artificial Sequence
  GATA2 Guide RNA
acccauccccagaucuggga

SEQ ID NO: 37612 - RNA, 20 nt, Artificial Sequence
  GATA2 Guide RNA
acccccaaaguucaguuccu

SEQ ID NO: 37613 - RNA, 20 nt, Artificial Sequence
  GATA2 Guide RNA
acccccgggucagggagagg

SEQ ID NO: 37614 - RNA, 20 nt, Artificial Sequence
  GATA2 Guide RNA
acccgggggucucaaacauc

SEQ ID NO: 37615 - RNA, 20 nt, Artificial Sequence
  GATA2 Guide RNA
acccuggggcaaggaacuga

SEQ ID NO: 37616 - RNA, 20 nt, Artificial Sequence
  GATA2 Guide RNA
accucucccaagucacagcu

SEQ ID NO: 37617 - RNA, 20 nt, Artificial Sequence
  GATA2 Guide RNA
acgcaaaugcuccccucuuc

SEQ ID NO: 37618 - RNA, 20 nt, Artificial Sequence
  GATA2 Guide RNA
acucuaaaacuuuugccauu

SEQ ID NO: 37619 - RNA, 20 nt, Artificial Sequence
  GATA2 Guide RNA
acugaacuuuggggguacac

SEQ ID NO: 37620 - RNA, 20 nt, Artificial Sequence
  GATA2 Guide RNA
acugccaccucucccaaguc

SEQ ID NO: 37621 - RNA, 20 nt, Artificial Sequence
  GATA2 Guide RNA
acugccugaccagaacauag

SEQ ID NO: 37622 - RNA, 20 nt, Artificial Sequence
  GATA2 Guide RNA
acuggaagcacuuaagaaaa

SEQ ID NO: 37623 - RNA, 20 nt, Artificial Sequence
  GATA2 Guide RNA
acuuaagaaaauggcaaaag

SEQ ID NO: 37624 - RNA, 20 nt, Artificial Sequence
  GATA2 Guide RNA
acuuaagauucagggaggga

SEQ ID NO: 37625 - RNA, 20 nt, Artificial Sequence
  GATA2 Guide RNA
acuucguggaagaggggagc

SEQ ID NO: 37626 - RNA, 20 nt, Artificial Sequence
  GATA2 Guide RNA
acuugggagagguggcagug

SEQ ID NO: 37627 - RNA, 20 nt, Artificial Sequence
  GATA2 Guide RNA
acuuuggggguacacuggaa

SEQ ID NO: 37628 - RNA, 20 nt, Artificial Sequence
  GATA2 Guide RNA
acuuuugccauuuucuuaag

SEQ ID NO: 37629 - RNA, 20 nt, Artificial Sequence
  GATA2 Guide RNA
agaacaggaauucccccuuu

SEQ ID NO: 37630 - RNA, 20 nt, Artificial Sequence
  GATA2 Guide RNA
agaacauagaacaggaauuc

SEQ ID NO: 37631 - RNA, 20 nt, Artificial Sequence
  GATA2 Guide RNA
agacaucacccauccccaga

SEQ ID NO: 37632 - RNA, 20 nt, Artificial Sequence
  GATA2 Guide RNA
agacccccgggucagggaga

SEQ ID NO: 37633 - RNA, 20 nt, Artificial Sequence
  GATA2 Guide RNA
agacucuaaaacuuuugcca

SEQ ID NO: 37634 - RNA, 20 nt, Artificial Sequence
  GATA2 Guide RNA
agagcgagacaucacccauc

SEQ ID NO: 37635 - RNA, 20 nt, Artificial Sequence
  GATA2 Guide RNA
agaggagacucuaaaacuuu

SEQ ID NO: 37636 - RNA, 20 nt, Artificial Sequence
  GATA2 Guide RNA
agaggggagcauuugcguuu

SEQ ID NO: 37637 - RNA, 20 nt, Artificial Sequence
  GATA2 Guide RNA
agagguggcaguguugguuu

SEQ ID NO: 37638 - RNA, 20 nt, Artificial Sequence
  GATA2 Guide RNA
agagucuccucucccugacc

SEQ ID NO: 37639 - RNA, 20 nt, Artificial Sequence
  GATA2 Guide RNA
agaucugggaaaccaacacu

SEQ ID NO: 37640 - RNA, 20 nt, Artificial Sequence
  GATA2 Guide RNA
agaucuggggaugggugaug

SEQ ID NO: 37641 - RNA, 20 nt, Artificial Sequence
  GATA2 Guide RNA
agauguuugagacccccggg

SEQ ID NO: 37642 - RNA, 20 nt, Artificial Sequence
  GATA2 Guide RNA
agauucagggagggaaaggg

SEQ ID NO: 37643 - RNA, 20 nt, Artificial Sequence
  GATA2 Guide RNA
agcacuuaagaaaauggcaa

SEQ ID NO: 37644 - RNA, 20 nt, Artificial Sequence
  GATA2 Guide RNA
agcagauguuugagaccccc

SEQ ID NO: 37645 - RNA, 20 nt, Artificial Sequence
  GATA2 Guide RNA
agcauuugcguuuuuguggu

SEQ ID NO: 37646 - RNA, 20 nt, Artificial Sequence
  GATA2 Guide RNA
agcccccagcagauguuuga

SEQ ID NO: 37647 - RNA, 20 nt, Artificial Sequence
  GATA2 Guide RNA
agcgagacaucacccauccc

SEQ ID NO: 37648 - RNA, 20 nt, Artificial Sequence
  GATA2 Guide RNA
agcuccccaccacaaaaacg

SEQ ID NO: 37649 - RNA, 20 nt, Artificial Sequence
  GATA2 Guide RNA
agcugugacuugggagaggu

SEQ ID NO: 37650 - RNA, 20 nt, Artificial Sequence
  GATA2 Guide RNA
aggaacugaacuuugggggu

SEQ ID NO: 37651 - RNA, 20 nt, Artificial Sequence
  GATA2 Guide RNA
aggaauucccccuuucccuc

SEQ ID NO: 37652 - RNA, 20 nt, Artificial Sequence
  GATA2 Guide RNA
aggagacucuaaaacuuuug

SEQ ID NO: 37653 - RNA, 20 nt, Artificial Sequence
  GATA2 Guide RNA
aggcagugaccaacccuggg

SEQ ID NO: 37654 - RNA, 20 nt, Artificial Sequence
  GATA2 Guide RNA
agggaaagggggaauuccug

SEQ ID NO: 37655 - RNA, 20 nt, Artificial Sequence
  GATA2 Guide RNA
agggagaggagacucuaaaa

SEQ ID NO: 37656 - RNA, 20 nt, Artificial Sequence
  GATA2 Guide RNA
agggagggaaagggggaauu

SEQ ID NO: 37657 - RNA, 20 nt, Artificial Sequence
  GATA2 Guide RNA
aggggagcauuugcguuuuu

SEQ ID NO: 37658 - RNA, 20 nt, Artificial Sequence
  GATA2 Guide RNA
agggggaauuccuguucuau

SEQ ID NO: 37659 - RNA, 20 nt, Artificial Sequence
  GATA2 Guide RNA
aggguuggucacugccugac

SEQ ID NO: 37660 - RNA, 20 nt, Artificial Sequence
  GATA2 Guide RNA
aggugcuggggacuucgugg

SEQ ID NO: 37661 - RNA, 20 nt, Artificial Sequence
  GATA2 Guide RNA
agguggcaguguugguuucc

SEQ ID NO: 37662 - RNA, 20 nt, Artificial Sequence
  GATA2 Guide RNA
agucacagcuccccaccaca

SEQ ID NO: 37663 - RNA, 20 nt, Artificial Sequence
  GATA2 Guide RNA
agucuccucucccugacccg

SEQ ID NO: 37664 - RNA, 20 nt, Artificial Sequence
  GATA2 Guide RNA
agugaccaacccuggggcaa

SEQ ID NO: 37665 - RNA, 20 nt, Artificial Sequence
  GATA2 Guide RNA
agugcuuccaguguaccccc

SEQ ID NO: 37666 - RNA, 20 nt, Artificial Sequence
  GATA2 Guide RNA
aguguacccccaaaguucag

SEQ ID NO: 37667 - RNA, 20 nt, Artificial Sequence
  GATA2 Guide RNA
aguguugguuucccagaucu

SEQ ID NO: 37668 - RNA, 20 nt, Artificial Sequence
  GATA2 Guide RNA
aguucaguuccuugccccag

SEQ ID NO: 37669 - RNA, 20 nt, Artificial Sequence
  GATA2 Guide RNA
aguuccuugccccaggguug

SEQ ID NO: 37670 - RNA, 20 nt, Artificial Sequence
  GATA2 Guide RNA
aguuuuagagucuccucucc

SEQ ID NO: 37671 - RNA, 20 nt, Artificial Sequence
  GATA2 Guide RNA
auagaacaggaauucccccu

SEQ ID NO: 37672 - RNA, 20 nt, Artificial Sequence
  GATA2 Guide RNA
auagcccccagcagauguuu

SEQ ID NO: 37673 - RNA, 20 nt, Artificial Sequence
  GATA2 Guide RNA
aucacccauccccagaucug

SEQ ID NO: 37674 - RNA, 20 nt, Artificial Sequence
  GATA2 Guide RNA
auccccagaucugggaaacc

SEQ ID NO: 37675 - RNA, 20 nt, Artificial Sequence
  GATA2 Guide RNA
aucugcugggggcuauuaga

SEQ ID NO: 37676 - RNA, 20 nt, Artificial Sequence
  GATA2 Guide RNA
aucugggaaaccaacacugc

SEQ ID NO: 37677 - RNA, 20 nt, Artificial Sequence
  GATA2 Guide RNA
aucuggggaugggugauguc

SEQ ID NO: 37678 - RNA, 20 nt, Artificial Sequence
  GATA2 Guide RNA
augcuccccucuuccacgaa

SEQ ID NO: 37679 - RNA, 20 nt, Artificial Sequence
  GATA2 Guide RNA
auggcaaaaguuuuagaguc

SEQ ID NO: 37680 - RNA, 20 nt, Artificial Sequence
  GATA2 Guide RNA
augggugaugucucgcucua

SEQ ID NO: 37681 - RNA, 20 nt, Artificial Sequence
  GATA2 Guide RNA
augucucgcucuaauagccc

SEQ ID NO: 37682 - RNA, 20 nt, Artificial Sequence
  GATA2 Guide RNA
auguucuggucaggcaguga

SEQ ID NO: 37683 - RNA, 20 nt, Artificial Sequence
  GATA2 Guide RNA
auguuugagacccccggguc

SEQ ID NO: 37684 - RNA, 20 nt, Artificial Sequence
  GATA2 Guide RNA
auuagagcgagacaucaccc

SEQ ID NO: 37685 - RNA, 20 nt, Artificial Sequence
  GATA2 Guide RNA
auucagggagggaaaggggg

SEQ ID NO: 37686 - RNA, 20 nt, Artificial Sequence
  GATA2 Guide RNA
auucccccuuucccucccug

SEQ ID NO: 37687 - RNA, 20 nt, Artificial Sequence
  GATA2 Guide RNA
auuccuguucuauguucugg

SEQ ID NO: 37688 - RNA, 20 nt, Artificial Sequence
  GATA2 Guide RNA
auuugcguuuuugugguggg

SEQ ID NO: 37689 - RNA, 20 nt, Artificial Sequence
  GATA2 Guide RNA
auuuucuuaagugcuuccag

SEQ ID NO: 37690 - RNA, 20 nt, Artificial Sequence
  GATA2 Guide RNA
caaaaacgcaaaugcucccc

SEQ ID NO: 37691 - RNA, 20 nt, Artificial Sequence
  GATA2 Guide RNA
caaaaguuuuagagucuccu

SEQ ID NO: 37692 - RNA, 20 nt, Artificial Sequence
  GATA2 Guide RNA
caaacaucugcugggggcua

SEQ ID NO: 37693 - RNA, 20 nt, Artificial Sequence
  GATA2 Guide RNA
caaaguucaguuccuugccc

SEQ ID NO: 37694 - RNA, 20 nt, Artificial Sequence
  GATA2 Guide RNA
caaaugcuccccucuuccac

SEQ ID NO: 37695 - RNA, 20 nt, Artificial Sequence
  GATA2 Guide RNA
caacacugccaccucuccca

SEQ ID NO: 37696 - RNA, 20 nt, Artificial Sequence
  GATA2 Guide RNA
caacccuggggcaaggaacu

SEQ ID NO: 37697 - RNA, 20 nt, Artificial Sequence
  GATA2 Guide RNA
caaggaacugaacuuugggg

SEQ ID NO: 37698 - RNA, 20 nt, Artificial Sequence
  GATA2 Guide RNA
caagucacagcuccccacca

SEQ ID NO: 37699 - RNA, 20 nt, Artificial Sequence
  GATA2 Guide RNA
cacaaaaacgcaaaugcucc

SEQ ID NO: 37700 - RNA, 20 nt, Artificial Sequence
  GATA2 Guide RNA
cacagcuccccaccacaaaa

SEQ ID NO: 37701 - RNA, 20 nt, Artificial Sequence
  GATA2 Guide RNA
caccacaaaaacgcaaaugc

SEQ ID NO: 37702 - RNA, 20 nt, Artificial Sequence
  GATA2 Guide RNA
cacccauccccagaucuggg

SEQ ID NO: 37703 - RNA, 20 nt, Artificial Sequence
  GATA2 Guide RNA
caccucucccaagucacagc

SEQ ID NO: 37704 - RNA, 20 nt, Artificial Sequence
  GATA2 Guide RNA
cacugccaccucucccaagu

SEQ ID NO: 37705 - RNA, 20 nt, Artificial Sequence
  GATA2 Guide RNA
cacugccugaccagaacaua

SEQ ID NO: 37706 - RNA, 20 nt, Artificial Sequence
  GATA2 Guide RNA
cacuggaagcacuuaagaaa

SEQ ID NO: 37707 - RNA, 20 nt, Artificial Sequence
  GATA2 Guide RNA
cacuuaagaaaauggcaaaa

SEQ ID NO: 37708 - RNA, 20 nt, Artificial Sequence
  GATA2 Guide RNA
cacuuaagauucagggaggg

SEQ ID NO: 37709 - RNA, 20 nt, Artificial Sequence
  GATA2 Guide RNA
cagaacauagaacaggaauu

SEQ ID NO: 37710 - RNA, 20 nt, Artificial Sequence
  GATA2 Guide RNA
cagaucugggaaaccaacac

SEQ ID NO: 37711 - RNA, 20 nt, Artificial Sequence
  GATA2 Guide RNA
cagaucuggggaugggugau

SEQ ID NO: 37712 - RNA, 20 nt, Artificial Sequence
  GATA2 Guide RNA
cagauguuugagacccccgg

SEQ ID NO: 37713 - RNA, 20 nt, Artificial Sequence
  GATA2 Guide RNA
cagcagauguuugagacccc

SEQ ID NO: 37714 - RNA, 20 nt, Artificial Sequence
  GATA2 Guide RNA
cagcuccccaccacaaaaac

SEQ ID NO: 37715 - RNA, 20 nt, Artificial Sequence
  GATA2 Guide RNA
caggaauucccccuuucccu

SEQ ID NO: 37716 - RNA, 20 nt, Artificial Sequence
  GATA2 Guide RNA
caggcagugaccaacccugg

SEQ ID NO: 37717 - RNA, 20 nt, Artificial Sequence
  GATA2 Guide RNA
cagggagaggagacucuaaa

SEQ ID NO: 37718 - RNA, 20 nt, Artificial Sequence
  GATA2 Guide RNA
cagggagggaaagggggaau

SEQ ID NO: 37719 - RNA, 20 nt, Artificial Sequence
  GATA2 Guide RNA
caggguuggucacugccuga

SEQ ID NO: 37720 - RNA, 20 nt, Artificial Sequence
  GATA2 Guide RNA
caggugcuggggacuucgug

SEQ ID NO: 37721 - RNA, 20 nt, Artificial Sequence
  GATA2 Guide RNA
cagugaccaacccuggggca

SEQ ID NO: 37722 - RNA, 20 nt, Artificial Sequence
  GATA2 Guide RNA
caguguacccccaaaguuca

SEQ ID NO: 37723 - RNA, 20 nt, Artificial Sequence
  GATA2 Guide RNA
caguguugguuucccagauc

SEQ ID NO: 37724 - RNA, 20 nt, Artificial Sequence
  GATA2 Guide RNA
caguuccuugccccaggguu

SEQ ID NO: 37725 - RNA, 20 nt, Artificial Sequence
  GATA2 Guide RNA
cauagaacaggaauuccccc

SEQ ID NO: 37726 - RNA, 20 nt, Artificial Sequence
  GATA2 Guide RNA
caucacccauccccagaucu

SEQ ID NO: 37727 - RNA, 20 nt, Artificial Sequence
  GATA2 Guide RNA
cauccccagaucugggaaac

SEQ ID NO: 37728 - RNA, 20 nt, Artificial Sequence
  GATA2 Guide RNA
caucugcugggggcuauuag

SEQ ID NO: 37729 - RNA, 20 nt, Artificial Sequence
  GATA2 Guide RNA
cauuugcguuuuuguggugg

SEQ ID NO: 37730 - RNA, 20 nt, Artificial Sequence
  GATA2 Guide RNA
cauuuucuuaagugcuucca

SEQ ID NO: 37731 - RNA, 20 nt, Artificial Sequence
  GATA2 Guide RNA
ccaaaguucaguuccuugcc

SEQ ID NO: 37732 - RNA, 20 nt, Artificial Sequence
  GATA2 Guide RNA
ccaacacugccaccucuccc

SEQ ID NO: 37733 - RNA, 20 nt, Artificial Sequence
  GATA2 Guide RNA
ccaacccuggggcaaggaac

SEQ ID NO: 37734 - RNA, 20 nt, Artificial Sequence
  GATA2 Guide RNA
ccaagucacagcuccccacc

SEQ ID NO: 37735 - RNA, 20 nt, Artificial Sequence
  GATA2 Guide RNA
ccacaaaaacgcaaaugcuc

SEQ ID NO: 37736 - RNA, 20 nt, Artificial Sequence
  GATA2 Guide RNA
ccaccacaaaaacgcaaaug

SEQ ID NO: 37737 - RNA, 20 nt, Artificial Sequence
  GATA2 Guide RNA
ccaccucucccaagucacag

SEQ ID NO: 37738 - RNA, 20 nt, Artificial Sequence
  GATA2 Guide RNA
ccagaacauagaacaggaau

SEQ ID NO: 37739 - RNA, 20 nt, Artificial Sequence
  GATA2 Guide RNA
ccagaucugggaaaccaaca

SEQ ID NO: 37740 - RNA, 20 nt, Artificial Sequence
  GATA2 Guide RNA
ccagaucuggggauggguga

SEQ ID NO: 37741 - RNA, 20 nt, Artificial Sequence
  GATA2 Guide RNA
ccagcagauguuugagaccc

SEQ ID NO: 37742 - RNA, 20 nt, Artificial Sequence
  GATA2 Guide RNA
ccaggguuggucacugccug

SEQ ID NO: 37743 - RNA, 20 nt, Artificial Sequence
  GATA2 Guide RNA
ccaguguacccccaaaguuc

SEQ ID NO: 37744 - RNA, 20 nt, Artificial Sequence
  GATA2 Guide RNA
ccauccccagaucugggaaa

SEQ ID NO: 37745 - RNA, 20 nt, Artificial Sequence
  GATA2 Guide RNA
ccauuuucuuaagugcuucc

SEQ ID NO: 37746 - RNA, 20 nt, Artificial Sequence
  GATA2 Guide RNA
cccaaaguucaguuccuugc

SEQ ID NO: 37747 - RNA, 20 nt, Artificial Sequence
  GATA2 Guide RNA
cccaagucacagcuccccac

SEQ ID NO: 37748 - RNA, 20 nt, Artificial Sequence
  GATA2 Guide RNA
cccaccacaaaaacgcaaau

SEQ ID NO: 37749 - RNA, 20 nt, Artificial Sequence
  GATA2 Guide RNA
cccagaucugggaaaccaac

SEQ ID NO: 37750 - RNA, 20 nt, Artificial Sequence
  GATA2 Guide RNA
cccagaucuggggaugggug

SEQ ID NO: 37751 - RNA, 20 nt, Artificial Sequence
  GATA2 Guide RNA
cccagcagauguuugagacc

SEQ ID NO: 37752 - RNA, 20 nt, Artificial Sequence
  GATA2 Guide RNA
cccaggguuggucacugccu

SEQ ID NO: 37753 - RNA, 20 nt, Artificial Sequence
  GATA2 Guide RNA
cccauccccagaucugggaa

SEQ ID NO: 37754 - RNA, 20 nt, Artificial Sequence
  GATA2 Guide RNA
ccccaaaguucaguuccuug

SEQ ID NO: 37755 - RNA, 20 nt, Artificial Sequence
  GATA2 Guide RNA
ccccaccacaaaaacgcaaa

SEQ ID NO: 37756 - RNA, 20 nt, Artificial Sequence
  GATA2 Guide RNA
ccccagaucugggaaaccaa

SEQ ID NO: 37757 - RNA, 20 nt, Artificial Sequence
  GATA2 Guide RNA
ccccagcagauguuugagac

SEQ ID NO: 37758 - RNA, 20 nt, Artificial Sequence
  GATA2 Guide RNA
ccccaggguuggucacugcc

SEQ ID NO: 37759 - RNA, 20 nt, Artificial Sequence
  GATA2 Guide RNA
cccccaaaguucaguuccuu

SEQ ID NO: 37760 - RNA, 20 nt, Artificial Sequence
  GATA2 Guide RNA
cccccagcagauguuugaga

SEQ ID NO: 37761 - RNA, 20 nt, Artificial Sequence
  GATA2 Guide RNA
cccccgggucagggagagga

SEQ ID NO: 37762 - RNA, 20 nt, Artificial Sequence
  GATA2 Guide RNA
cccccuuucccucccugaau

SEQ ID NO: 37763 - RNA, 20 nt, Artificial Sequence
  GATA2 Guide RNA
ccccgggucagggagaggag

SEQ ID NO: 37764 - RNA, 20 nt, Artificial Sequence
  GATA2 Guide RNA
ccccucuuccacgaaguccc

SEQ ID NO: 37765 - RNA, 20 nt, Artificial Sequence
  GATA2 Guide RNA
ccccuuucccucccugaauc

SEQ ID NO: 37766 - RNA, 20 nt, Artificial Sequence
  GATA2 Guide RNA
cccgggggucucaaacaucu

SEQ ID NO: 37767 - RNA, 20 nt, Artificial Sequence
  GATA2 Guide RNA
cccgggucagggagaggaga

SEQ ID NO: 37768 - RNA, 20 nt, Artificial Sequence
  GATA2 Guide RNA
cccucccugaaucuuaagug

SEQ ID NO: 37769 - RNA, 20 nt, Artificial Sequence
  GATA2 Guide RNA
cccucuuccacgaagucccc

SEQ ID NO: 37770 - RNA, 20 nt, Artificial Sequence
  GATA2 Guide RNA
cccugacccgggggucucaa

SEQ ID NO: 37771 - RNA, 20 nt, Artificial Sequence
  GATA2 Guide RNA
cccuggggcaaggaacugaa

SEQ ID NO: 37772 - RNA, 20 nt, Artificial Sequence
  GATA2 Guide RNA
cccuuucccucccugaaucu

SEQ ID NO: 37773 - RNA, 20 nt, Artificial Sequence
  GATA2 Guide RNA
ccgggggucucaaacaucug

SEQ ID NO: 37774 - RNA, 20 nt, Artificial Sequence
  GATA2 Guide RNA
ccgggucagggagaggagac

SEQ ID NO: 37775 - RNA, 20 nt, Artificial Sequence
  GATA2 Guide RNA
ccucucccaagucacagcuc

SEQ ID NO: 37776 - RNA, 20 nt, Artificial Sequence
  GATA2 Guide RNA
ccucucccugacccgggggu

SEQ ID NO: 37777 - RNA, 20 nt, Artificial Sequence
  GATA2 Guide RNA
ccucuuccacgaagucccca

SEQ ID NO: 37778 - RNA, 20 nt, Artificial Sequence
  GATA2 Guide RNA
ccugaccagaacauagaaca

SEQ ID NO: 37779 - RNA, 20 nt, Artificial Sequence
  GATA2 Guide RNA
ccugacccgggggucucaaa

SEQ ID NO: 37780 - RNA, 20 nt, Artificial Sequence
  GATA2 Guide RNA
ccuggggcaaggaacugaac

SEQ ID NO: 37781 - RNA, 20 nt, Artificial Sequence
  GATA2 Guide RNA
ccuguucuauguucugguca

SEQ ID NO: 37782 - RNA, 20 nt, Artificial Sequence
  GATA2 Guide RNA
ccuugccccaggguugguca

SEQ ID NO: 37783 - RNA, 20 nt, Artificial Sequence
  GATA2 Guide RNA
ccuuucccucccugaaucuu

SEQ ID NO: 37784 - RNA, 20 nt, Artificial Sequence
  GATA2 Guide RNA
cgagacaucacccaucccca

SEQ ID NO: 37785 - RNA, 20 nt, Artificial Sequence
  GATA2 Guide RNA
cgcaaaugcuccccucuucc

SEQ ID NO: 37786 - RNA, 20 nt, Artificial Sequence
  GATA2 Guide RNA
cgcucuaauagcccccagca

SEQ ID NO: 37787 - RNA, 20 nt, Artificial Sequence
  GATA2 Guide RNA
cgggggucucaaacaucugc

SEQ ID NO: 37788 - RNA, 20 nt, Artificial Sequence
  GATA2 Guide RNA
cgggucagggagaggagacu

SEQ ID NO: 37789 - RNA, 20 nt, Artificial Sequence
  GATA2 Guide RNA
cguggaagaggggagcauuu

SEQ ID NO: 37790 - RNA, 20 nt, Artificial Sequence
  GATA2 Guide RNA
cguuuuugugguggggagcu

SEQ ID NO: 37791 - RNA, 20 nt, Artificial Sequence
  GATA2 Guide RNA
cuaaaacuuuugccauuuuc

SEQ ID NO: 37792 - RNA, 20 nt, Artificial Sequence
  GATA2 Guide RNA
cuaauagcccccagcagaug

SEQ ID NO: 37793 - RNA, 20 nt, Artificial Sequence
  GATA2 Guide RNA
cuauguucuggucaggcagu

SEQ ID NO: 37794 - RNA, 20 nt, Artificial Sequence
  GATA2 Guide RNA
cuauuagagcgagacaucac

SEQ ID NO: 37795 - RNA, 20 nt, Artificial Sequence
  GATA2 Guide RNA
cucaaacaucugcugggggc

SEQ ID NO: 37796 - RNA, 20 nt, Artificial Sequence
  GATA2 Guide RNA
cucccaagucacagcucccc

SEQ ID NO: 37797 - RNA, 20 nt, Artificial Sequence
  GATA2 Guide RNA
cuccccaccacaaaaacgca

SEQ ID NO: 37798 - RNA, 20 nt, Artificial Sequence
  GATA2 Guide RNA
cuccccucuuccacgaaguc

SEQ ID NO: 37799 - RNA, 20 nt, Artificial Sequence
  GATA2 Guide RNA
cucccugacccgggggucuc

SEQ ID NO: 37800 - RNA, 20 nt, Artificial Sequence
  GATA2 Guide RNA
cuccucucccugacccgggg

SEQ ID NO: 37801 - RNA, 20 nt, Artificial Sequence
  GATA2 Guide RNA
cucgcucuaauagcccccag

SEQ ID NO: 37802 - RNA, 20 nt, Artificial Sequence
  GATA2 Guide RNA
cucuaaaacuuuugccauuu

SEQ ID NO: 37803 - RNA, 20 nt, Artificial Sequence
  GATA2 Guide RNA
cucuaauagcccccagcaga

SEQ ID NO: 37804 - RNA, 20 nt, Artificial Sequence
  GATA2 Guide RNA
cucucccaagucacagcucc

SEQ ID NO: 37805 - RNA, 20 nt, Artificial Sequence
  GATA2 Guide RNA
cucucccugacccggggguc

SEQ ID NO: 37806 - RNA, 20 nt, Artificial Sequence
  GATA2 Guide RNA
cucuuccacgaaguccccag

SEQ ID NO: 37807 - RNA, 20 nt, Artificial Sequence
  GATA2 Guide RNA
cugaacuuuggggguacacu

SEQ ID NO: 37808 - RNA, 20 nt, Artificial Sequence
  GATA2 Guide RNA
cugaccagaacauagaacag

SEQ ID NO: 37809 - RNA, 20 nt, Artificial Sequence
  GATA2 Guide RNA
cugacccgggggucucaaac

SEQ ID NO: 37810 - RNA, 20 nt, Artificial Sequence
  GATA2 Guide RNA
cugccaccucucccaaguca

SEQ ID NO: 37811 - RNA, 20 nt, Artificial Sequence
  GATA2 Guide RNA
cugccugaccagaacauaga

SEQ ID NO: 37812 - RNA, 20 nt, Artificial Sequence
  GATA2 Guide RNA
cugcugggggcuauuagagc

SEQ ID NO: 37813 - RNA, 20 nt, Artificial Sequence
  GATA2 Guide RNA
cuggaagcacuuaagaaaau

SEQ ID NO: 37814 - RNA, 20 nt, Artificial Sequence
  GATA2 Guide RNA
cugggaaaccaacacugcca

SEQ ID NO: 37815 - RNA, 20 nt, Artificial Sequence
  GATA2 Guide RNA
cuggggacuucguggaagag

SEQ ID NO: 37816 - RNA, 20 nt, Artificial Sequence
  GATA2 Guide RNA
cuggggaugggugaugucuc

SEQ ID NO: 37817 - RNA, 20 nt, Artificial Sequence
  GATA2 Guide RNA
cuggggcaaggaacugaacu

SEQ ID NO: 37818 - RNA, 20 nt, Artificial Sequence
  GATA2 Guide RNA
cugggggcuauuagagcgag

SEQ ID NO: 37819 - RNA, 20 nt, Artificial Sequence
  GATA2 Guide RNA
cuggucaggcagugaccaac

SEQ ID NO: 37820 - RNA, 20 nt, Artificial Sequence
  GATA2 Guide RNA
cugugacuugggagaggugg

SEQ ID NO: 37821 - RNA, 20 nt, Artificial Sequence
  GATA2 Guide RNA
cuguucuauguucuggucag

SEQ ID NO: 37822 - RNA, 20 nt, Artificial Sequence
  GATA2 Guide RNA
cuuaagaaaauggcaaaagu

SEQ ID NO: 37823 - RNA, 20 nt, Artificial Sequence
  GATA2 Guide RNA
cuuaagauucagggagggaa

SEQ ID NO: 37824 - RNA, 20 nt, Artificial Sequence
  GATA2 Guide RNA
cuuaagugcuuccaguguac

SEQ ID NO: 37825 - RNA, 20 nt, Artificial Sequence
  GATA2 Guide RNA
cuuccacgaaguccccagca

SEQ ID NO: 37826 - RNA, 20 nt, Artificial Sequence
  GATA2 Guide RNA
cuuccaguguacccccaaag

SEQ ID NO: 37827 - RNA, 20 nt, Artificial Sequence
  GATA2 Guide RNA
cuucguggaagaggggagca

SEQ ID NO: 37828 - RNA, 20 nt, Artificial Sequence
  GATA2 Guide RNA
cuugccccaggguuggucac

SEQ ID NO: 37829 - RNA, 20 nt, Artificial Sequence
  GATA2 Guide RNA
cuugggagagguggcagugu

SEQ ID NO: 37830 - RNA, 20 nt, Artificial Sequence
  GATA2 Guide RNA
cuuucccucccugaaucuua

SEQ ID NO: 37831 - RNA, 20 nt, Artificial Sequence
  GATA2 Guide RNA
cuuuggggguacacuggaag

SEQ ID NO: 37832 - RNA, 20 nt, Artificial Sequence
  GATA2 Guide RNA
cuuuugccauuuucuuaagu

SEQ ID NO: 37833 - RNA, 20 nt, Artificial Sequence
  GATA2 Guide RNA
gaaaauggcaaaaguuuuag

SEQ ID NO: 37834 - RNA, 20 nt, Artificial Sequence
  GATA2 Guide RNA
gaaaccaacacugccaccuc

SEQ ID NO: 37835 - RNA, 20 nt, Artificial Sequence
  GATA2 Guide RNA
gaaagggggaauuccuguuc

SEQ ID NO: 37836 - RNA, 20 nt, Artificial Sequence
  GATA2 Guide RNA
gaacaggaauucccccuuuc

SEQ ID NO: 37837 - RNA, 20 nt, Artificial Sequence
  GATA2 Guide RNA
gaacauagaacaggaauucc

SEQ ID NO: 37838 - RNA, 20 nt, Artificial Sequence
  GATA2 Guide RNA
gaacugaacuuuggggguac

SEQ ID NO: 37839 - RNA, 20 nt, Artificial Sequence
  GATA2 Guide RNA
gaacuuuggggguacacugg

SEQ ID NO: 37840 - RNA, 20 nt, Artificial Sequence
  GATA2 Guide RNA
gaagaggggagcauuugcgu

SEQ ID NO: 37841 - RNA, 20 nt, Artificial Sequence
  GATA2 Guide RNA
gaagcacuuaagaaaauggc

SEQ ID NO: 37842 - RNA, 20 nt, Artificial Sequence
  GATA2 Guide RNA
gaauucccccuuucccuccc

SEQ ID NO: 37843 - RNA, 20 nt, Artificial Sequence
  GATA2 Guide RNA
gaauuccuguucuauguucu

SEQ ID NO: 37844 - RNA, 20 nt, Artificial Sequence
  GATA2 Guide RNA
gacaucacccauccccagau

SEQ ID NO: 37845 - RNA, 20 nt, Artificial Sequence
  GATA2 Guide RNA
gaccaacccuggggcaagga

SEQ ID NO: 37846 - RNA, 20 nt, Artificial Sequence
  GATA2 Guide RNA
gaccagaacauagaacagga

SEQ ID NO: 37847 - RNA, 20 nt, Artificial Sequence
  GATA2 Guide RNA
gacccccgggucagggagag

SEQ ID NO: 37848 - RNA, 20 nt, Artificial Sequence
  GATA2 Guide RNA
gacccgggggucucaaacau

SEQ ID NO: 37849 - RNA, 20 nt, Artificial Sequence
  GATA2 Guide RNA
gacucuaaaacuuuugccau

SEQ ID NO: 37850 - RNA, 20 nt, Artificial Sequence
  GATA2 Guide RNA
gacuucguggaagaggggag

SEQ ID NO: 37851 - RNA, 20 nt, Artificial Sequence
  GATA2 Guide RNA
gacuugggagagguggcagu

SEQ ID NO: 37852 - RNA, 20 nt, Artificial Sequence
  GATA2 Guide RNA
gagacaucacccauccccag

SEQ ID NO: 37853 - RNA, 20 nt, Artificial Sequence
  GATA2 Guide RNA
gagacccccgggucagggag

SEQ ID NO: 37854 - RNA, 20 nt, Artificial Sequence
  GATA2 Guide RNA
gagacucuaaaacuuuugcc

SEQ ID NO: 37855 - RNA, 20 nt, Artificial Sequence
  GATA2 Guide RNA
gagaggagacucuaaaacuu

SEQ ID NO: 37856 - RNA, 20 nt, Artificial Sequence
  GATA2 Guide RNA
gagagguggcaguguugguu

SEQ ID NO: 37857 - RNA, 20 nt, Artificial Sequence
  GATA2 Guide RNA
gagcauuugcguuuuugugg

SEQ ID NO: 37858 - RNA, 20 nt, Artificial Sequence
  GATA2 Guide RNA
gagcgagacaucacccaucc

SEQ ID NO: 37859 - RNA, 20 nt, Artificial Sequence
  GATA2 Guide RNA
gagcugugacuugggagagg

SEQ ID NO: 37860 - RNA, 20 nt, Artificial Sequence
  GATA2 Guide RNA
gaggagacucuaaaacuuuu

SEQ ID NO: 37861 - RNA, 20 nt, Artificial Sequence
  GATA2 Guide RNA
gagggaaagggggaauuccu

SEQ ID NO: 37862 - RNA, 20 nt, Artificial Sequence
  GATA2 Guide RNA
gaggggagcauuugcguuuu

SEQ ID NO: 37863 - RNA, 20 nt, Artificial Sequence
  GATA2 Guide RNA
gagguggcaguguugguuuc

SEQ ID NO: 37864 - RNA, 20 nt, Artificial Sequence
  GATA2 Guide RNA
gagucuccucucccugaccc

SEQ ID NO: 37865 - RNA, 20 nt, Artificial Sequence
  GATA2 Guide RNA
gaucugggaaaccaacacug

SEQ ID NO: 37866 - RNA, 20 nt, Artificial Sequence
  GATA2 Guide RNA
gaucuggggaugggugaugu

SEQ ID NO: 37867 - RNA, 20 nt, Artificial Sequence
  GATA2 Guide RNA
gaugggugaugucucgcucu

SEQ ID NO: 37868 - RNA, 20 nt, Artificial Sequence
  GATA2 Guide RNA
gaugucucgcucuaauagcc

SEQ ID NO: 37869 - RNA, 20 nt, Artificial Sequence
  GATA2 Guide RNA
gauguuugagacccccgggu

SEQ ID NO: 37870 - RNA, 20 nt, Artificial Sequence
  GATA2 Guide RNA
gauucagggagggaaagggg

SEQ ID NO: 37871 - RNA, 20 nt, Artificial Sequence
  GATA2 Guide RNA
gcaaaaguuuuagagucucc

SEQ ID NO: 37872 - RNA, 20 nt, Artificial Sequence
  GATA2 Guide RNA
gcaaaugcuccccucuucca

SEQ ID NO: 37873 - RNA, 20 nt, Artificial Sequence
  GATA2 Guide RNA
gcaaggaacugaacuuuggg

SEQ ID NO: 37874 - RNA, 20 nt, Artificial Sequence
  GATA2 Guide RNA
gcacuuaagaaaauggcaaa

SEQ ID NO: 37875 - RNA, 20 nt, Artificial Sequence
  GATA2 Guide RNA
gcagauguuugagacccccg

SEQ ID NO: 37876 - RNA, 20 nt, Artificial Sequence
  GATA2 Guide RNA
gcaggugcuggggacuucgu

SEQ ID NO: 37877 - RNA, 20 nt, Artificial Sequence
  GATA2 Guide RNA
gcagugaccaacccuggggc

SEQ ID NO: 37878 - RNA, 20 nt, Artificial Sequence
  GATA2 Guide RNA
gcaguguugguuucccagau

SEQ ID NO: 37879 - RNA, 20 nt, Artificial Sequence
  GATA2 Guide RNA
gcauuugcguuuuuguggug

SEQ ID NO: 37880 - RNA, 20 nt, Artificial Sequence
  GATA2 Guide RNA
gccaccucucccaagucaca

SEQ ID NO: 37881 - RNA, 20 nt, Artificial Sequence
  GATA2 Guide RNA
gccauuuucuuaagugcuuc

SEQ ID NO: 37882 - RNA, 20 nt, Artificial Sequence
  GATA2 Guide RNA
gccccaggguuggucacugc

SEQ ID NO: 37883 - RNA, 20 nt, Artificial Sequence
  GATA2 Guide RNA
gcccccagcagauguuugag

SEQ ID NO: 37884 - RNA, 20 nt, Artificial Sequence
  GATA2 Guide RNA
gccugaccagaacauagaac

SEQ ID NO: 37885 - RNA, 20 nt, Artificial Sequence
  GATA2 Guide RNA
gcgagacaucacccaucccc

SEQ ID NO: 37886 - RNA, 20 nt, Artificial Sequence
  GATA2 Guide RNA
gcguuuuugugguggggagc

SEQ ID NO: 37887 - RNA, 20 nt, Artificial Sequence
  GATA2 Guide RNA
gcuauuagagcgagacauca

SEQ ID NO: 37888 - RNA, 20 nt, Artificial Sequence
  GATA2 Guide RNA
gcuccccaccacaaaaacgc

SEQ ID NO: 37889 - RNA, 20 nt, Artificial Sequence
  GATA2 Guide RNA
gcuccccucuuccacgaagu

SEQ ID NO: 37890 - RNA, 20 nt, Artificial Sequence
  GATA2 Guide RNA
gcucuaauagcccccagcag

SEQ ID NO: 37891 - RNA, 20 nt, Artificial Sequence
  GATA2 Guide RNA
gcuggggacuucguggaaga

SEQ ID NO: 37892 - RNA, 20 nt, Artificial Sequence
  GATA2 Guide RNA
gcugggggcuauuagagcga

SEQ ID NO: 37893 - RNA, 20 nt, Artificial Sequence
  GATA2 Guide RNA
gcugugacuugggagaggug

SEQ ID NO: 37894 - RNA, 20 nt, Artificial Sequence
  GATA2 Guide RNA
gcuuccaguguacccccaaa

SEQ ID NO: 37895 - RNA, 20 nt, Artificial Sequence
  GATA2 Guide RNA
ggaaaccaacacugccaccu

SEQ ID NO: 37896 - RNA, 20 nt, Artificial Sequence
  GATA2 Guide RNA
ggaaagggggaauuccuguu

SEQ ID NO: 37897 - RNA, 20 nt, Artificial Sequence
  GATA2 Guide RNA
ggaacugaacuuugggggua

SEQ ID NO: 37898 - RNA, 20 nt, Artificial Sequence
  GATA2 Guide RNA
ggaagaggggagcauuugcg

SEQ ID NO: 37899 - RNA, 20 nt, Artificial Sequence
  GATA2 Guide RNA
ggaagcacuuaagaaaaugg

SEQ ID NO: 37900 - RNA, 20 nt, Artificial Sequence
  GATA2 Guide RNA
ggaauucccccuuucccucc

SEQ ID NO: 37901 - RNA, 20 nt, Artificial Sequence
  GATA2 Guide RNA
ggaauuccuguucuauguuc

SEQ ID NO: 37902 - RNA, 20 nt, Artificial Sequence
  GATA2 Guide RNA
ggacuucguggaagagggga

SEQ ID NO: 37903 - RNA, 20 nt, Artificial Sequence
  GATA2 Guide RNA
ggagacucuaaaacuuuugc

SEQ ID NO: 37904 - RNA, 20 nt, Artificial Sequence
  GATA2 Guide RNA
ggagaggagacucuaaaacu

SEQ ID NO: 37905 - RNA, 20 nt, Artificial Sequence
  GATA2 Guide RNA
ggagagguggcaguguuggu

SEQ ID NO: 37906 - RNA, 20 nt, Artificial Sequence
  GATA2 Guide RNA
ggagcauuugcguuuuugug

SEQ ID NO: 37907 - RNA, 20 nt, Artificial Sequence
  GATA2 Guide RNA
ggagcugugacuugggagag

SEQ ID NO: 37908 - RNA, 20 nt, Artificial Sequence
  GATA2 Guide RNA
ggagggaaagggggaauucc

SEQ ID NO: 37909 - RNA, 20 nt, Artificial Sequence
  GATA2 Guide RNA
ggaugggugaugucucgcuc

SEQ ID NO: 37910 - RNA, 20 nt, Artificial Sequence
  GATA2 Guide RNA
ggcaaaaguuuuagagucuc

SEQ ID NO: 37911 - RNA, 20 nt, Artificial Sequence
  GATA2 Guide RNA
ggcaaggaacugaacuuugg

SEQ ID NO: 37912 - RNA, 20 nt, Artificial Sequence
  GATA2 Guide RNA
ggcaggugcuggggacuucg

SEQ ID NO: 37913 - RNA, 20 nt, Artificial Sequence
  GATA2 Guide RNA
ggcagugaccaacccugggg

SEQ ID NO: 37914 - RNA, 20 nt, Artificial Sequence
  GATA2 Guide RNA
ggcaguguugguuucccaga

SEQ ID NO: 37915 - RNA, 20 nt, Artificial Sequence
  GATA2 Guide RNA
ggcuauuagagcgagacauc

SEQ ID NO: 37916 - RNA, 20 nt, Artificial Sequence
  GATA2 Guide RNA
gggaaaccaacacugccacc

SEQ ID NO: 37917 - RNA, 20 nt, Artificial Sequence
  GATA2 Guide RNA
gggaaagggggaauuccugu

SEQ ID NO: 37918 - RNA, 20 nt, Artificial Sequence
  GATA2 Guide RNA
gggaauuccuguucuauguu

SEQ ID NO: 37919 - RNA, 20 nt, Artificial Sequence
  GATA2 Guide RNA
gggacuucguggaagagggg

SEQ ID NO: 37920 - RNA, 20 nt, Artificial Sequence
  GATA2 Guide RNA
gggagaggagacucuaaaac

SEQ ID NO: 37921 - RNA, 20 nt, Artificial Sequence
  GATA2 Guide RNA
gggagagguggcaguguugg

SEQ ID NO: 37922 - RNA, 20 nt, Artificial Sequence
  GATA2 Guide RNA
gggagcauuugcguuuuugu

SEQ ID NO: 37923 - RNA, 20 nt, Artificial Sequence
  GATA2 Guide RNA
gggagcugugacuugggaga

SEQ ID NO: 37924 - RNA, 20 nt, Artificial Sequence
  GATA2 Guide RNA
gggagggaaagggggaauuc

SEQ ID NO: 37925 - RNA, 20 nt, Artificial Sequence
  GATA2 Guide RNA
gggaugggugaugucucgcu

SEQ ID NO: 37926 - RNA, 20 nt, Artificial Sequence
  GATA2 Guide RNA
gggcaaggaacugaacuuug

SEQ ID NO: 37927 - RNA, 20 nt, Artificial Sequence
  GATA2 Guide RNA
gggcuauuagagcgagacau

SEQ ID NO: 37928 - RNA, 20 nt, Artificial Sequence
  GATA2 Guide RNA
ggggaauuccuguucuaugu

SEQ ID NO: 37929 - RNA, 20 nt, Artificial Sequence
  GATA2 Guide RNA
ggggacuucguggaagaggg

SEQ ID NO: 37930 - RNA, 20 nt, Artificial Sequence
  GATA2 Guide RNA
ggggagcauuugcguuuuug

SEQ ID NO: 37931 - RNA, 20 nt, Artificial Sequence
  GATA2 Guide RNA
ggggagcugugacuugggag

SEQ ID NO: 37932 - RNA, 20 nt, Artificial Sequence
  GATA2 Guide RNA
ggggaugggugaugucucgc

SEQ ID NO: 37933 - RNA, 20 nt, Artificial Sequence
  GATA2 Guide RNA
ggggcaaggaacugaacuuu

SEQ ID NO: 37934 - RNA, 20 nt, Artificial Sequence
  GATA2 Guide RNA
ggggcuauuagagcgagaca

SEQ ID NO: 37935 - RNA, 20 nt, Artificial Sequence
  GATA2 Guide RNA
gggggaauuccuguucuaug

SEQ ID NO: 37936 - RNA, 20 nt, Artificial Sequence
  GATA2 Guide RNA
gggggcuauuagagcgagac

SEQ ID NO: 37937 - RNA, 20 nt, Artificial Sequence
  GATA2 Guide RNA
ggggguacacuggaagcacu

SEQ ID NO: 37938 - RNA, 20 nt, Artificial Sequence
  GATA2 Guide RNA
gggggucucaaacaucugcu

SEQ ID NO: 37939 - RNA, 20 nt, Artificial Sequence
  GATA2 Guide RNA
gggguacacuggaagcacuu

SEQ ID NO: 37940 - RNA, 20 nt, Artificial Sequence
  GATA2 Guide RNA
ggggucucaaacaucugcug

SEQ ID NO: 37941 - RNA, 20 nt, Artificial Sequence
  GATA2 Guide RNA
ggguacacuggaagcacuua

SEQ ID NO: 37942 - RNA, 20 nt, Artificial Sequence
  GATA2 Guide RNA
gggucagggagaggagacuc

SEQ ID NO: 37943 - RNA, 20 nt, Artificial Sequence
  GATA2 Guide RNA
gggucucaaacaucugcugg

SEQ ID NO: 37944 - RNA, 20 nt, Artificial Sequence
  GATA2 Guide RNA
gggugaugucucgcucuaau

SEQ ID NO: 37945 - RNA, 20 nt, Artificial Sequence
  GATA2 Guide RNA
ggguuggucacugccugacc

SEQ ID NO: 37946 - RNA, 20 nt, Artificial Sequence
  GATA2 Guide RNA
gguacacuggaagcacuuaa

SEQ ID NO: 37947 - RNA, 20 nt, Artificial Sequence
  GATA2 Guide RNA
ggucacugccugaccagaac

SEQ ID NO: 37948 - RNA, 20 nt, Artificial Sequence
  GATA2 Guide RNA
ggucaggcagugaccaaccc

SEQ ID NO: 37949 - RNA, 20 nt, Artificial Sequence
  GATA2 Guide RNA
ggucagggagaggagacucu

SEQ ID NO: 37950 - RNA, 20 nt, Artificial Sequence
  GATA2 Guide RNA
ggucucaaacaucugcuggg

SEQ ID NO: 37951 - RNA, 20 nt, Artificial Sequence
  GATA2 Guide RNA
ggugaugucucgcucuaaua

SEQ ID NO: 37952 - RNA, 20 nt, Artificial Sequence
  GATA2 Guide RNA
ggugcuggggacuucgugga

SEQ ID NO: 37953 - RNA, 20 nt, Artificial Sequence
  GATA2 Guide RNA
gguggcaguguugguuuccc

SEQ ID NO: 37954 - RNA, 20 nt, Artificial Sequence
  GATA2 Guide RNA
gguggggagcugugacuugg

SEQ ID NO: 37955 - RNA, 20 nt, Artificial Sequence
  GATA2 Guide RNA
gguuggucacugccugacca

SEQ ID NO: 37956 - RNA, 20 nt, Artificial Sequence
  GATA2 Guide RNA
gguuucccagaucuggggau

SEQ ID NO: 37957 - RNA, 20 nt, Artificial Sequence
  GATA2 Guide RNA
guacacuggaagcacuuaag

SEQ ID NO: 37958 - RNA, 20 nt, Artificial Sequence
  GATA2 Guide RNA
guacccccaaaguucaguuc

SEQ ID NO: 37959 - RNA, 20 nt, Artificial Sequence
  GATA2 Guide RNA
gucacagcuccccaccacaa

SEQ ID NO: 37960 - RNA, 20 nt, Artificial Sequence
  GATA2 Guide RNA
gucacugccugaccagaaca

SEQ ID NO: 37961 - RNA, 20 nt, Artificial Sequence
  GATA2 Guide RNA
gucaggcagugaccaacccu

SEQ ID NO: 37962 - RNA, 20 nt, Artificial Sequence
  GATA2 Guide RNA
gucagggagaggagacucua

SEQ ID NO: 37963 - RNA, 20 nt, Artificial Sequence
  GATA2 Guide RNA
gucucaaacaucugcugggg

SEQ ID NO: 37964 - RNA, 20 nt, Artificial Sequence
  GATA2 Guide RNA
gucuccucucccugacccgg

SEQ ID NO: 37965 - RNA, 20 nt, Artificial Sequence
  GATA2 Guide RNA
gucucgcucuaauagccccc

SEQ ID NO: 37966 - RNA, 20 nt, Artificial Sequence
  GATA2 Guide RNA
gugaccaacccuggggcaag

SEQ ID NO: 37967 - RNA, 20 nt, Artificial Sequence
  GATA2 Guide RNA
gugacuugggagagguggca

SEQ ID NO: 37968 - RNA, 20 nt, Artificial Sequence
  GATA2 Guide RNA
gugaugucucgcucuaauag

SEQ ID NO: 37969 - RNA, 20 nt, Artificial Sequence
  GATA2 Guide RNA
gugcuggggacuucguggaa

SEQ ID NO: 37970 - RNA, 20 nt, Artificial Sequence
  GATA2 Guide RNA
gugcuuccaguguaccccca

SEQ ID NO: 37971 - RNA, 20 nt, Artificial Sequence
  GATA2 Guide RNA
guggaagaggggagcauuug

SEQ ID NO: 37972 - RNA, 20 nt, Artificial Sequence
  GATA2 Guide RNA
guggcaguguugguuuccca

SEQ ID NO: 37973 - RNA, 20 nt, Artificial Sequence
  GATA2 Guide RNA
guggggagcugugacuuggg

SEQ ID NO: 37974 - RNA, 20 nt, Artificial Sequence
  GATA2 Guide RNA
gugguggggagcugugacuu

SEQ ID NO: 37975 - RNA, 20 nt, Artificial Sequence
  GATA2 Guide RNA
guguacccccaaaguucagu

SEQ ID NO: 37976 - RNA, 20 nt, Artificial Sequence
  GATA2 Guide RNA
guguugguuucccagaucug

SEQ ID NO: 37977 - RNA, 20 nt, Artificial Sequence
  GATA2 Guide RNA
guucaguuccuugccccagg

SEQ ID NO: 37978 - RNA, 20 nt, Artificial Sequence
  GATA2 Guide RNA
guuccuugccccaggguugg

SEQ ID NO: 37979 - RNA, 20 nt, Artificial Sequence
  GATA2 Guide RNA
guucuauguucuggucaggc

SEQ ID NO: 37980 - RNA, 20 nt, Artificial Sequence
  GATA2 Guide RNA
guucuggucaggcagugacc

SEQ ID NO: 37981 - RNA, 20 nt, Artificial Sequence
  GATA2 Guide RNA
guuggucacugccugaccag

SEQ ID NO: 37982 - RNA, 20 nt, Artificial Sequence
  GATA2 Guide RNA
guugguuucccagaucuggg

SEQ ID NO: 37983 - RNA, 20 nt, Artificial Sequence
  GATA2 Guide RNA
guuucccagaucuggggaug

SEQ ID NO: 37984 - RNA, 20 nt, Artificial Sequence
  GATA2 Guide RNA
guuugagacccccgggucag

SEQ ID NO: 37985 - RNA, 20 nt, Artificial Sequence
  GATA2 Guide RNA
guuuuagagucuccucuccc

SEQ ID NO: 37986 - RNA, 20 nt, Artificial Sequence
  GATA2 Guide RNA
guuuuugugguggggagcug

SEQ ID NO: 37987 - RNA, 20 nt, Artificial Sequence
  GATA2 Guide RNA
uaagauucagggagggaaag

SEQ ID NO: 37988 - RNA, 20 nt, Artificial Sequence
  GATA2 Guide RNA
uaagugcuuccaguguaccc

SEQ ID NO: 37989 - RNA, 20 nt, Artificial Sequence
  GATA2 Guide RNA
uaauagcccccagcagaugu

SEQ ID NO: 37990 - RNA, 20 nt, Artificial Sequence
  GATA2 Guide RNA
uacacuggaagcacuuaaga

SEQ ID NO: 37991 - RNA, 20 nt, Artificial Sequence
  GATA2 Guide RNA
uacccccaaaguucaguucc

SEQ ID NO: 37992 - RNA, 20 nt, Artificial Sequence
  GATA2 Guide RNA
uagaacaggaauucccccuu

SEQ ID NO: 37993 - RNA, 20 nt, Artificial Sequence
  GATA2 Guide RNA
uagagcgagacaucacccau

SEQ ID NO: 37994 - RNA, 20 nt, Artificial Sequence
  GATA2 Guide RNA
uagagucuccucucccugac

SEQ ID NO: 37995 - RNA, 20 nt, Artificial Sequence
  GATA2 Guide RNA
uagcccccagcagauguuug

SEQ ID NO: 37996 - RNA, 20 nt, Artificial Sequence
  GATA2 Guide RNA
uauguucuggucaggcagug

SEQ ID NO: 37997 - RNA, 20 nt, Artificial Sequence
  GATA2 Guide RNA
uauuagagcgagacaucacc

SEQ ID NO: 37998 - RNA, 20 nt, Artificial Sequence
  GATA2 Guide RNA
ucaaacaucugcugggggcu

SEQ ID NO: 37999 - RNA, 20 nt, Artificial Sequence
  GATA2 Guide RNA
ucacagcuccccaccacaaa

SEQ ID NO: 38000 - RNA, 20 nt, Artificial Sequence
  GATA2 Guide RNA
ucacccauccccagaucugg

SEQ ID NO: 38001 - RNA, 20 nt, Artificial Sequence
  GATA2 Guide RNA
ucacugccugaccagaacau

SEQ ID NO: 38002 - RNA, 20 nt, Artificial Sequence
  GATA2 Guide RNA
ucacuuaagauucagggagg

SEQ ID NO: 38003 - RNA, 20 nt, Artificial Sequence
  GATA2 Guide RNA
ucaggcagugaccaacccug

SEQ ID NO: 38004 - RNA, 20 nt, Artificial Sequence
  GATA2 Guide RNA
ucagggagaggagacucuaa

SEQ ID NO: 38005 - RNA, 20 nt, Artificial Sequence
  GATA2 Guide RNA
ucagggagggaaagggggaa

SEQ ID NO: 38006 - RNA, 20 nt, Artificial Sequence
  GATA2 Guide RNA
ucaguuccuugccccagggu

SEQ ID NO: 38007 - RNA, 20 nt, Artificial Sequence
  GATA2 Guide RNA
uccacgaaguccccagcacc

SEQ ID NO: 38008 - RNA, 20 nt, Artificial Sequence
  GATA2 Guide RNA
uccaguguacccccaaaguu

SEQ ID NO: 38009 - RNA, 20 nt, Artificial Sequence
  GATA2 Guide RNA
ucccaagucacagcucccca

SEQ ID NO: 38010 - RNA, 20 nt, Artificial Sequence
  GATA2 Guide RNA
ucccagaucuggggaugggu

SEQ ID NO: 38011 - RNA, 20 nt, Artificial Sequence
  GATA2 Guide RNA
uccccaccacaaaaacgcaa

SEQ ID NO: 38012 - RNA, 20 nt, Artificial Sequence
  GATA2 Guide RNA
uccccagaucugggaaacca

SEQ ID NO: 38013 - RNA, 20 nt, Artificial Sequence
  GATA2 Guide RNA
ucccccuuucccucccugaa

SEQ ID NO: 38014 - RNA, 20 nt, Artificial Sequence
  GATA2 Guide RNA
uccccucuuccacgaagucc

SEQ ID NO: 38015 - RNA, 20 nt, Artificial Sequence
  GATA2 Guide RNA
ucccucccugaaucuuaagu

SEQ ID NO: 38016 - RNA, 20 nt, Artificial Sequence
  GATA2 Guide RNA
ucccugacccgggggucuca

SEQ ID NO: 38017 - RNA, 20 nt, Artificial Sequence
  GATA2 Guide RNA
uccucucccugacccggggg

SEQ ID NO: 38018 - RNA, 20 nt, Artificial Sequence
  GATA2 Guide RNA
uccuguucuauguucugguc

SEQ ID NO: 38019 - RNA, 20 nt, Artificial Sequence
  GATA2 Guide RNA
uccuugccccaggguugguc

SEQ ID NO: 38020 - RNA, 20 nt, Artificial Sequence
  GATA2 Guide RNA
ucgcucuaauagcccccagc

SEQ ID NO: 38021 - RNA, 20 nt, Artificial Sequence
  GATA2 Guide RNA
ucguggaagaggggagcauu

SEQ ID NO: 38022 - RNA, 20 nt, Artificial Sequence
  GATA2 Guide RNA
ucuaauagcccccagcagau

SEQ ID NO: 38023 - RNA, 20 nt, Artificial Sequence
  GATA2 Guide RNA
ucuauguucuggucaggcag

SEQ ID NO: 38024 - RNA, 20 nt, Artificial Sequence
  GATA2 Guide RNA
ucucaaacaucugcuggggg

SEQ ID NO: 38025 - RNA, 20 nt, Artificial Sequence
  GATA2 Guide RNA
ucucccaagucacagcuccc

SEQ ID NO: 38026 - RNA, 20 nt, Artificial Sequence
  GATA2 Guide RNA
ucucccugacccgggggucu

SEQ ID NO: 38027 - RNA, 20 nt, Artificial Sequence
  GATA2 Guide RNA
ucuccucucccugacccggg

SEQ ID NO: 38028 - RNA, 20 nt, Artificial Sequence
  GATA2 Guide RNA
ucucgcucuaauagccccca

SEQ ID NO: 38029 - RNA, 20 nt, Artificial Sequence
  GATA2 Guide RNA
ucugcugggggcuauuagag

SEQ ID NO: 38030 - RNA, 20 nt, Artificial Sequence
  GATA2 Guide RNA
ucugggaaaccaacacugcc

SEQ ID NO: 38031 - RNA, 20 nt, Artificial Sequence
  GATA2 Guide RNA
ucuggggaugggugaugucu

SEQ ID NO: 38032 - RNA, 20 nt, Artificial Sequence
  GATA2 Guide RNA
ucuggucaggcagugaccaa

SEQ ID NO: 38033 - RNA, 20 nt, Artificial Sequence
  GATA2 Guide RNA
ucuuaagugcuuccagugua

SEQ ID NO: 38034 - RNA, 20 nt, Artificial Sequence
  GATA2 Guide RNA
ucuuccacgaaguccccagc

SEQ ID NO: 38035 - RNA, 20 nt, Artificial Sequence
  GATA2 Guide RNA
ugaacuuuggggguacacug

SEQ ID NO: 38036 - RNA, 20 nt, Artificial Sequence
  GATA2 Guide RNA
ugaccaacccuggggcaagg

SEQ ID NO: 38037 - RNA, 20 nt, Artificial Sequence
  GATA2 Guide RNA
ugaccagaacauagaacagg

SEQ ID NO: 38038 - RNA, 20 nt, Artificial Sequence
  GATA2 Guide RNA
ugacccgggggucucaaaca

SEQ ID NO: 38039 - RNA, 20 nt, Artificial Sequence
  GATA2 Guide RNA
ugacuugggagagguggcag

SEQ ID NO: 38040 - RNA, 20 nt, Artificial Sequence
  GATA2 Guide RNA
ugagacccccgggucaggga

SEQ ID NO: 38041 - RNA, 20 nt, Artificial Sequence
  GATA2 Guide RNA
ugaugucucgcucuaauagc

SEQ ID NO: 38042 - RNA, 20 nt, Artificial Sequence
  GATA2 Guide RNA
ugccaccucucccaagucac

SEQ ID NO: 38043 - RNA, 20 nt, Artificial Sequence
  GATA2 Guide RNA
ugccauuuucuuaagugcuu

SEQ ID NO: 38044 - RNA, 20 nt, Artificial Sequence
  GATA2 Guide RNA
ugccccaggguuggucacug

SEQ ID NO: 38045 - RNA, 20 nt, Artificial Sequence
  GATA2 Guide RNA
ugccugaccagaacauagaa

SEQ ID NO: 38046 - RNA, 20 nt, Artificial Sequence
  GATA2 Guide RNA
ugcguuuuugugguggggag

SEQ ID NO: 38047 - RNA, 20 nt, Artificial Sequence
  GATA2 Guide RNA
ugcuccccucuuccacgaag

SEQ ID NO: 38048 - RNA, 20 nt, Artificial Sequence
  GATA2 Guide RNA
ugcuggggacuucguggaag

SEQ ID NO: 38049 - RNA, 20 nt, Artificial Sequence
  GATA2 Guide RNA
ugcugggggcuauuagagcg

SEQ ID NO: 38050 - RNA, 20 nt, Artificial Sequence
  GATA2 Guide RNA
ugcuuccaguguacccccaa

SEQ ID NO: 38051 - RNA, 20 nt, Artificial Sequence
  GATA2 Guide RNA
uggaagaggggagcauuugc

SEQ ID NO: 38052 - RNA, 20 nt, Artificial Sequence
  GATA2 Guide RNA
uggaagcacuuaagaaaaug

SEQ ID NO: 38053 - RNA, 20 nt, Artificial Sequence
  GATA2 Guide RNA
uggcaaaaguuuuagagucu

SEQ ID NO: 38054 - RNA, 20 nt, Artificial Sequence
  GATA2 Guide RNA
uggcaguguugguuucccag

SEQ ID NO: 38055 - RNA, 20 nt, Artificial Sequence
  GATA2 Guide RNA
ugggaaaccaacacugccac

SEQ ID NO: 38056 - RNA, 20 nt, Artificial Sequence
  GATA2 Guide RNA
ugggagagguggcaguguug

SEQ ID NO: 38057 - RNA, 20 nt, Artificial Sequence
  GATA2 Guide RNA
uggggacuucguggaagagg

SEQ ID NO: 38058 - RNA, 20 nt, Artificial Sequence
  GATA2 Guide RNA
uggggagcugugacuuggga

SEQ ID NO: 38059 - RNA, 20 nt, Artificial Sequence
  GATA2 Guide RNA
uggggaugggugaugucucg

SEQ ID NO: 38060 - RNA, 20 nt, Artificial Sequence
  GATA2 Guide RNA
uggggcaaggaacugaacuu

SEQ ID NO: 38061 - RNA, 20 nt, Artificial Sequence
  GATA2 Guide RNA
ugggggcuauuagagcgaga

SEQ ID NO: 38062 - RNA, 20 nt, Artificial Sequence
  GATA2 Guide RNA
uggggguacacuggaagcac

SEQ ID NO: 38063 - RNA, 20 nt, Artificial Sequence
  GATA2 Guide RNA
ugggugaugucucgcucuaa

SEQ ID NO: 38064 - RNA, 20 nt, Artificial Sequence
  GATA2 Guide RNA
uggucacugccugaccagaa

SEQ ID NO: 38065 - RNA, 20 nt, Artificial Sequence
  GATA2 Guide RNA
uggucaggcagugaccaacc

SEQ ID NO: 38066 - RNA, 20 nt, Artificial Sequence
  GATA2 Guide RNA
ugguggggagcugugacuug

SEQ ID NO: 38067 - RNA, 20 nt, Artificial Sequence
  GATA2 Guide RNA
ugguuucccagaucugggga

SEQ ID NO: 38068 - RNA, 20 nt, Artificial Sequence
  GATA2 Guide RNA
uguacccccaaaguucaguu

SEQ ID NO: 38069 - RNA, 20 nt, Artificial Sequence
  GATA2 Guide RNA
ugucucgcucuaauagcccc

SEQ ID NO: 38070 - RNA, 20 nt, Artificial Sequence
  GATA2 Guide RNA
ugugacuugggagagguggc

SEQ ID NO: 38071 - RNA, 20 nt, Artificial Sequence
  GATA2 Guide RNA
ugugguggggagcugugacu

SEQ ID NO: 38072 - RNA, 20 nt, Artificial Sequence
  GATA2 Guide RNA
uguucuauguucuggucagg

SEQ ID NO: 38073 - RNA, 20 nt, Artificial Sequence
  GATA2 Guide RNA
uguucuggucaggcagugac

SEQ ID NO: 38074 - RNA, 20 nt, Artificial Sequence
  GATA2 Guide RNA
uguugguuucccagaucugg

SEQ ID NO: 38075 - RNA, 20 nt, Artificial Sequence
  GATA2 Guide RNA
uguuugagacccccggguca

SEQ ID NO: 38076 - RNA, 20 nt, Artificial Sequence
  GATA2 Guide RNA
uuaagauucagggagggaaa

SEQ ID NO: 38077 - RNA, 20 nt, Artificial Sequence
  GATA2 Guide RNA
uuaagugcuuccaguguacc

SEQ ID NO: 38078 - RNA, 20 nt, Artificial Sequence
  GATA2 Guide RNA
uuagagcgagacaucaccca

SEQ ID NO: 38079 - RNA, 20 nt, Artificial Sequence
  GATA2 Guide RNA
uuagagucuccucucccuga

SEQ ID NO: 38080 - RNA, 20 nt, Artificial Sequence
  GATA2 Guide RNA
uucacuuaagauucagggag

SEQ ID NO: 38081 - RNA, 20 nt, Artificial Sequence
  GATA2 Guide RNA
uucagggagggaaaggggga

SEQ ID NO: 38082 - RNA, 20 nt, Artificial Sequence
  GATA2 Guide RNA
uucaguuccuugccccaggg

SEQ ID NO: 38083 - RNA, 20 nt, Artificial Sequence
  GATA2 Guide RNA
uuccacgaaguccccagcac

SEQ ID NO: 38084 - RNA, 20 nt, Artificial Sequence
  GATA2 Guide RNA
uuccaguguacccccaaagu

SEQ ID NO: 38085 - RNA, 20 nt, Artificial Sequence
  GATA2 Guide RNA
uucccagaucuggggauggg

SEQ ID NO: 38086 - RNA, 20 nt, Artificial Sequence
  GATA2 Guide RNA
uucccccuuucccucccuga

SEQ ID NO: 38087 - RNA, 20 nt, Artificial Sequence
  GATA2 Guide RNA
uucccucccugaaucuuaag

SEQ ID NO: 38088 - RNA, 20 nt, Artificial Sequence
  GATA2 Guide RNA
uuccuguucuauguucuggu

SEQ ID NO: 38089 - RNA, 20 nt, Artificial Sequence
  GATA2 Guide RNA
uuccuugccccaggguuggu

SEQ ID NO: 38090 - RNA, 20 nt, Artificial Sequence
  GATA2 Guide RNA
uucguggaagaggggagcau

SEQ ID NO: 38091 - RNA, 20 nt, Artificial Sequence
  GATA2 Guide RNA
uucuauguucuggucaggca

SEQ ID NO: 38092 - RNA, 20 nt, Artificial Sequence
  GATA2 Guide RNA
uucuggucaggcagugacca

SEQ ID NO: 38093 - RNA, 20 nt, Artificial Sequence
  GATA2 Guide RNA
uucuuaagugcuuccagugu

SEQ ID NO: 38094 - RNA, 20 nt, Artificial Sequence
  GATA2 Guide RNA
uugagacccccgggucaggg

SEQ ID NO: 38095 - RNA, 20 nt, Artificial Sequence
  GATA2 Guide RNA
uugccauuuucuuaagugcu

SEQ ID NO: 38096 - RNA, 20 nt, Artificial Sequence
  GATA2 Guide RNA
uugccccaggguuggucacu

SEQ ID NO: 38097 - RNA, 20 nt, Artificial Sequence
  GATA2 Guide RNA
uugcguuuuuguggugggga

SEQ ID NO: 38098 - RNA, 20 nt, Artificial Sequence
  GATA2 Guide RNA
uugggagagguggcaguguu

SEQ ID NO: 38099 - RNA, 20 nt, Artificial Sequence
  GATA2 Guide RNA
uuggggguacacuggaagca

SEQ ID NO: 38100 - RNA, 20 nt, Artificial Sequence
  GATA2 Guide RNA
uuggucacugccugaccaga

SEQ ID NO: 38101 - RNA, 20 nt, Artificial Sequence
  GATA2 Guide RNA
uugguuucccagaucugggg

SEQ ID NO: 38102 - RNA, 20 nt, Artificial Sequence
  GATA2 Guide RNA
uugugguggggagcugugac

SEQ ID NO: 38103 - RNA, 20 nt, Artificial Sequence
  GATA2 Guide RNA
uuuagagucuccucucccug

SEQ ID NO: 38104 - RNA, 20 nt, Artificial Sequence
  GATA2 Guide RNA
uuucacuuaagauucaggga

SEQ ID NO: 38105 - RNA, 20 nt, Artificial Sequence
  GATA2 Guide RNA
uuucccagaucuggggaugg

SEQ ID NO: 38106 - RNA, 20 nt, Artificial Sequence
  GATA2 Guide RNA
uuucccucccugaaucuuaa

SEQ ID NO: 38107 - RNA, 20 nt, Artificial Sequence
  GATA2 Guide RNA
uuucuuaagugcuuccagug

SEQ ID NO: 38108 - RNA, 20 nt, Artificial Sequence
  GATA2 Guide RNA
uuugagacccccgggucagg

SEQ ID NO: 38109 - RNA, 20 nt, Artificial Sequence
  GATA2 Guide RNA
uuugccauuuucuuaagugc

SEQ ID NO: 38110 - RNA, 20 nt, Artificial Sequence
  GATA2 Guide RNA
uuugcguuuuuguggugggg

SEQ ID NO: 38111 - RNA, 20 nt, Artificial Sequence
  GATA2 Guide RNA
uuuggggguacacuggaagc

SEQ ID NO: 38112 - RNA, 20 nt, Artificial Sequence
  GATA2 Guide RNA
uuugugguggggagcuguga

SEQ ID NO: 38113 - RNA, 20 nt, Artificial Sequence
  GATA2 Guide RNA
uuuuagagucuccucucccu

SEQ ID NO: 38114 - RNA, 20 nt, Artificial Sequence
  GATA2 Guide RNA
uuuucacuuaagauucaggg

SEQ ID NO: 38115 - RNA, 20 nt, Artificial Sequence
  GATA2 Guide RNA
uuuucuuaagugcuuccagu

SEQ ID NO: 38116 - RNA, 20 nt, Artificial Sequence
  GATA2 Guide RNA
uuuugccauuuucuuaagug

SEQ ID NO: 38117 - RNA, 20 nt, Artificial Sequence
  GATA2 Guide RNA
uuuugugguggggagcugug

SEQ ID NO: 38118 - RNA, 20 nt, Artificial Sequence
  GATA2 Guide RNA
uuuuugugguggggagcugu

SEQ ID NO: 38119 - RNA, 21 nt, Artificial Sequence
  GATA2 Guide RNA
aaaaacgcaaaugcuccccuc

SEQ ID NO: 38120 - RNA, 21 nt, Artificial Sequence
  GATA2 Guide RNA
aaaacgcaaaugcuccccucu

SEQ ID NO: 38121 - RNA, 21 nt, Artificial Sequence
  GATA2 Guide RNA
aaaaguuuuagagucuccucu

SEQ ID NO: 38122 - RNA, 21 nt, Artificial Sequence
  GATA2 Guide RNA
aaacaucugcugggggcuauu

SEQ ID NO: 38123 - RNA, 21 nt, Artificial Sequence
  GATA2 Guide RNA
aaaccaacacugccaccucuc

SEQ ID NO: 38124 - RNA, 21 nt, Artificial Sequence
  GATA2 Guide RNA
aaacgcaaaugcuccccucuu

SEQ ID NO: 38125 - RNA, 21 nt, Artificial Sequence
  GATA2 Guide RNA
aaagggggaauuccuguucua

SEQ ID NO: 38126 - RNA, 21 nt, Artificial Sequence
  GATA2 Guide RNA
aaaguucaguuccuugcccca

SEQ ID NO: 38127 - RNA, 21 nt, Artificial Sequence
  GATA2 Guide RNA
aaaguuuuagagucuccucuc

SEQ ID NO: 38128 - RNA, 21 nt, Artificial Sequence
  GATA2 Guide RNA
aaaugcuccccucuuccacga

SEQ ID NO: 38129 - RNA, 21 nt, Artificial Sequence
  GATA2 Guide RNA
aacacugccaccucucccaag

SEQ ID NO: 38130 - RNA, 21 nt, Artificial Sequence
  GATA2 Guide RNA
aacaggaauucccccuuuccc

SEQ ID NO: 38131 - RNA, 21 nt, Artificial Sequence
  GATA2 Guide RNA
aacauagaacaggaauucccc

SEQ ID NO: 38132 - RNA, 21 nt, Artificial Sequence
  GATA2 Guide RNA
aacaucugcugggggcuauua

SEQ ID NO: 38133 - RNA, 21 nt, Artificial Sequence
  GATA2 Guide RNA
aaccaacacugccaccucucc

SEQ ID NO: 38134 - RNA, 21 nt, Artificial Sequence
  GATA2 Guide RNA
aacccuggggcaaggaacuga

SEQ ID NO: 38135 - RNA, 21 nt, Artificial Sequence
  GATA2 Guide RNA
aacgcaaaugcuccccucuuc

SEQ ID NO: 38136 - RNA, 21 nt, Artificial Sequence
  GATA2 Guide RNA
aacugaacuuuggggguacac

SEQ ID NO: 38137 - RNA, 21 nt, Artificial Sequence
  GATA2 Guide RNA
aacuuuggggguacacuggaa

SEQ ID NO: 38138 - RNA, 21 nt, Artificial Sequence
  GATA2 Guide RNA
aagaggggagcauuugcguuu

SEQ ID NO: 38139 - RNA, 21 nt, Artificial Sequence
  GATA2 Guide RNA
aagauucagggagggaaaggg

SEQ ID NO: 38140 - RNA, 21 nt, Artificial Sequence
  GATA2 Guide RNA
aagcacuuaagaaaauggcaa

SEQ ID NO: 38141 - RNA, 21 nt, Artificial Sequence
  GATA2 Guide RNA
aaggaacugaacuuugggggu

SEQ ID NO: 38142 - RNA, 21 nt, Artificial Sequence
  GATA2 Guide RNA
aagggggaauuccuguucuau

SEQ ID NO: 38143 - RNA, 21 nt, Artificial Sequence
  GATA2 Guide RNA
aagucacagcuccccaccaca

SEQ ID NO: 38144 - RNA, 21 nt, Artificial Sequence
  GATA2 Guide RNA
aagugcuuccaguguaccccc

SEQ ID NO: 38145 - RNA, 21 nt, Artificial Sequence
  GATA2 Guide RNA
aaguucaguuccuugccccag

SEQ ID NO: 38146 - RNA, 21 nt, Artificial Sequence
  GATA2 Guide RNA
aaguuuuagagucuccucucc

SEQ ID NO: 38147 - RNA, 21 nt, Artificial Sequence
  GATA2 Guide RNA
aauagcccccagcagauguuu

SEQ ID NO: 38148 - RNA, 21 nt, Artificial Sequence
  GATA2 Guide RNA
aaugcuccccucuuccacgaa

SEQ ID NO: 38149 - RNA, 21 nt, Artificial Sequence
  GATA2 Guide RNA
aauggcaaaaguuuuagaguc

SEQ ID NO: 38150 - RNA, 21 nt, Artificial Sequence
  GATA2 Guide RNA
aauucccccuuucccucccug

SEQ ID NO: 38151 - RNA, 21 nt, Artificial Sequence
  GATA2 Guide RNA
aauuccuguucuauguucugg

SEQ ID NO: 38152 - RNA, 21 nt, Artificial Sequence
  GATA2 Guide RNA
acaaaaacgcaaaugcucccc

SEQ ID NO: 38153 - RNA, 21 nt, Artificial Sequence
  GATA2 Guide RNA
acacugccaccucucccaagu

SEQ ID NO: 38154 - RNA, 21 nt, Artificial Sequence
  GATA2 Guide RNA
acacuggaagcacuuaagaaa

SEQ ID NO: 38155 - RNA, 21 nt, Artificial Sequence
  GATA2 Guide RNA
acagcuccccaccacaaaaac

SEQ ID NO: 38156 - RNA, 21 nt, Artificial Sequence
  GATA2 Guide RNA
acaggaauucccccuuucccu

SEQ ID NO: 38157 - RNA, 21 nt, Artificial Sequence
  GATA2 Guide RNA
acauagaacaggaauuccccc

SEQ ID NO: 38158 - RNA, 21 nt, Artificial Sequence
  GATA2 Guide RNA
acaucacccauccccagaucu

SEQ ID NO: 38159 - RNA, 21 nt, Artificial Sequence
  GATA2 Guide RNA
acaucugcugggggcuauuag

SEQ ID NO: 38160 - RNA, 21 nt, Artificial Sequence
  GATA2 Guide RNA
accaacacugccaccucuccc

SEQ ID NO: 38161 - RNA, 21 nt, Artificial Sequence
  GATA2 Guide RNA
accaacccuggggcaaggaac

SEQ ID NO: 38162 - RNA, 21 nt, Artificial Sequence
  GATA2 Guide RNA
accacaaaaacgcaaaugcuc

SEQ ID NO: 38163 - RNA, 21 nt, Artificial Sequence
  GATA2 Guide RNA
accagaacauagaacaggaau

SEQ ID NO: 38164 - RNA, 21 nt, Artificial Sequence
  GATA2 Guide RNA
acccauccccagaucugggaa

SEQ ID NO: 38165 - RNA, 21 nt, Artificial Sequence
  GATA2 Guide RNA
acccccaaaguucaguuccuu

SEQ ID NO: 38166 - RNA, 21 nt, Artificial Sequence
  GATA2 Guide RNA
acccccgggucagggagagga

SEQ ID NO: 38167 - RNA, 21 nt, Artificial Sequence
  GATA2 Guide RNA
acccgggggucucaaacaucu

SEQ ID NO: 38168 - RNA, 21 nt, Artificial Sequence
  GATA2 Guide RNA
acccuggggcaaggaacugaa

SEQ ID NO: 38169 - RNA, 21 nt, Artificial Sequence
  GATA2 Guide RNA
accucucccaagucacagcuc

SEQ ID NO: 38170 - RNA, 21 nt, Artificial Sequence
  GATA2 Guide RNA
acgcaaaugcuccccucuucc

SEQ ID NO: 38171 - RNA, 21 nt, Artificial Sequence
  GATA2 Guide RNA
acugaacuuuggggguacacu

SEQ ID NO: 38172 - RNA, 21 nt, Artificial Sequence
  GATA2 Guide RNA
acugccaccucucccaaguca

SEQ ID NO: 38173 - RNA, 21 nt, Artificial Sequence
  GATA2 Guide RNA
acugccugaccagaacauaga

SEQ ID NO: 38174 - RNA, 21 nt, Artificial Sequence
  GATA2 Guide RNA
acuggaagcacuuaagaaaau

SEQ ID NO: 38175 - RNA, 21 nt, Artificial Sequence
  GATA2 Guide RNA
acuuaagauucagggagggaa

SEQ ID NO: 38176 - RNA, 21 nt, Artificial Sequence
  GATA2 Guide RNA
acuucguggaagaggggagca

SEQ ID NO: 38177 - RNA, 21 nt, Artificial Sequence
  GATA2 Guide RNA
acuugggagagguggcagugu

SEQ ID NO: 38178 - RNA, 21 nt, Artificial Sequence
  GATA2 Guide RNA
acuuuggggguacacuggaag

SEQ ID NO: 38179 - RNA, 21 nt, Artificial Sequence
  GATA2 Guide RNA
agaacaggaauucccccuuuc

SEQ ID NO: 38180 - RNA, 21 nt, Artificial Sequence
  GATA2 Guide RNA
agaacauagaacaggaauucc

SEQ ID NO: 38181 - RNA, 21 nt, Artificial Sequence
  GATA2 Guide RNA
agacaucacccauccccagau

SEQ ID NO: 38182 - RNA, 21 nt, Artificial Sequence
  GATA2 Guide RNA
agacccccgggucagggagag

SEQ ID NO: 38183 - RNA, 21 nt, Artificial Sequence
  GATA2 Guide RNA
agacucuaaaacuuuugccau

SEQ ID NO: 38184 - RNA, 21 nt, Artificial Sequence
  GATA2 Guide RNA
agagcgagacaucacccaucc

SEQ ID NO: 38185 - RNA, 21 nt, Artificial Sequence
  GATA2 Guide RNA
agaggagacucuaaaacuuuu

SEQ ID NO: 38186 - RNA, 21 nt, Artificial Sequence
  GATA2 Guide RNA
agaggggagcauuugcguuuu

SEQ ID NO: 38187 - RNA, 21 nt, Artificial Sequence
  GATA2 Guide RNA
agagguggcaguguugguuuc

SEQ ID NO: 38188 - RNA, 21 nt, Artificial Sequence
  GATA2 Guide RNA
agagucuccucucccugaccc

SEQ ID NO: 38189 - RNA, 21 nt, Artificial Sequence
  GATA2 Guide RNA
agaucugggaaaccaacacug

SEQ ID NO: 38190 - RNA, 21 nt, Artificial Sequence
  GATA2 Guide RNA
agaucuggggaugggugaugu

SEQ ID NO: 38191 - RNA, 21 nt, Artificial Sequence
  GATA2 Guide RNA
agauguuugagacccccgggu

SEQ ID NO: 38192 - RNA, 21 nt, Artificial Sequence
  GATA2 Guide RNA
agauucagggagggaaagggg

SEQ ID NO: 38193 - RNA, 21 nt, Artificial Sequence
  GATA2 Guide RNA
agcacuuaagaaaauggcaaa

SEQ ID NO: 38194 - RNA, 21 nt, Artificial Sequence
  GATA2 Guide RNA
agcagauguuugagacccccg

SEQ ID NO: 38195 - RNA, 21 nt, Artificial Sequence
  GATA2 Guide RNA
agcauuugcguuuuuguggug

SEQ ID NO: 38196 - RNA, 21 nt, Artificial Sequence
  GATA2 Guide RNA
agcccccagcagauguuugag

SEQ ID NO: 38197 - RNA, 21 nt, Artificial Sequence
  GATA2 Guide RNA
agcgagacaucacccaucccc

SEQ ID NO: 38198 - RNA, 21 nt, Artificial Sequence
  GATA2 Guide RNA
agcuccccaccacaaaaacgc

SEQ ID NO: 38199 - RNA, 21 nt, Artificial Sequence
  GATA2 Guide RNA
agcugugacuugggagaggug

SEQ ID NO: 38200 - RNA, 21 nt, Artificial Sequence
  GATA2 Guide RNA
aggaacugaacuuugggggua

SEQ ID NO: 38201 - RNA, 21 nt, Artificial Sequence
  GATA2 Guide RNA
aggaauucccccuuucccucc

SEQ ID NO: 38202 - RNA, 21 nt, Artificial Sequence
  GATA2 Guide RNA
aggagacucuaaaacuuuugc

SEQ ID NO: 38203 - RNA, 21 nt, Artificial Sequence
  GATA2 Guide RNA
aggcagugaccaacccugggg

SEQ ID NO: 38204 - RNA, 21 nt, Artificial Sequence
  GATA2 Guide RNA
agggaaagggggaauuccugu

SEQ ID NO: 38205 - RNA, 21 nt, Artificial Sequence
  GATA2 Guide RNA
agggagaggagacucuaaaac

SEQ ID NO: 38206 - RNA, 21 nt, Artificial Sequence
  GATA2 Guide RNA
agggagggaaagggggaauuc

SEQ ID NO: 38207 - RNA, 21 nt, Artificial Sequence
  GATA2 Guide RNA
aggggagcauuugcguuuuug

SEQ ID NO: 38208 - RNA, 21 nt, Artificial Sequence
  GATA2 Guide RNA
agggggaauuccuguucuaug

SEQ ID NO: 38209 - RNA, 21 nt, Artificial Sequence
  GATA2 Guide RNA
aggguuggucacugccugacc

SEQ ID NO: 38210 - RNA, 21 nt, Artificial Sequence
  GATA2 Guide RNA
aggugcuggggacuucgugga

SEQ ID NO: 38211 - RNA, 21 nt, Artificial Sequence
  GATA2 Guide RNA
agguggcaguguugguuuccc

SEQ ID NO: 38212 - RNA, 21 nt, Artificial Sequence
  GATA2 Guide RNA
agucacagcuccccaccacaa

SEQ ID NO: 38213 - RNA, 21 nt, Artificial Sequence
  GATA2 Guide RNA
agucuccucucccugacccgg

SEQ ID NO: 38214 - RNA, 21 nt, Artificial Sequence
  GATA2 Guide RNA
agugaccaacccuggggcaag

SEQ ID NO: 38215 - RNA, 21 nt, Artificial Sequence
  GATA2 Guide RNA
agugcuuccaguguaccccca

SEQ ID NO: 38216 - RNA, 21 nt, Artificial Sequence
  GATA2 Guide RNA
aguguacccccaaaguucagu

SEQ ID NO: 38217 - RNA, 21 nt, Artificial Sequence
  GATA2 Guide RNA
aguguugguuucccagaucug

SEQ ID NO: 38218 - RNA, 21 nt, Artificial Sequence
  GATA2 Guide RNA
aguucaguuccuugccccagg

SEQ ID NO: 38219 - RNA, 21 nt, Artificial Sequence
  GATA2 Guide RNA
aguuccuugccccaggguugg

SEQ ID NO: 38220 - RNA, 21 nt, Artificial Sequence
  GATA2 Guide RNA
aguuuuagagucuccucuccc

SEQ ID NO: 38221 - RNA, 21 nt, Artificial Sequence
  GATA2 Guide RNA
auagaacaggaauucccccuu

SEQ ID NO: 38222 - RNA, 21 nt, Artificial Sequence
  GATA2 Guide RNA
auagcccccagcagauguuug

SEQ ID NO: 38223 - RNA, 21 nt, Artificial Sequence
  GATA2 Guide RNA
aucacccauccccagaucugg

SEQ ID NO: 38224 - RNA, 21 nt, Artificial Sequence
  GATA2 Guide RNA
auccccagaucugggaaacca

SEQ ID NO: 38225 - RNA, 21 nt, Artificial Sequence
  GATA2 Guide RNA
aucugcugggggcuauuagag

SEQ ID NO: 38226 - RNA, 21 nt, Artificial Sequence
  GATA2 Guide RNA
aucugggaaaccaacacugcc

SEQ ID NO: 38227 - RNA, 21 nt, Artificial Sequence
  GATA2 Guide RNA
aucuggggaugggugaugucu

SEQ ID NO: 38228 - RNA, 21 nt, Artificial Sequence
  GATA2 Guide RNA
augcuccccucuuccacgaag

SEQ ID NO: 38229 - RNA, 21 nt, Artificial Sequence
  GATA2 Guide RNA
auggcaaaaguuuuagagucu

SEQ ID NO: 38230 - RNA, 21 nt, Artificial Sequence
  GATA2 Guide RNA
augggugaugucucgcucuaa

SEQ ID NO: 38231 - RNA, 21 nt, Artificial Sequence
  GATA2 Guide RNA
augucucgcucuaauagcccc

SEQ ID NO: 38232 - RNA, 21 nt, Artificial Sequence
  GATA2 Guide RNA
auguucuggucaggcagugac

SEQ ID NO: 38233 - RNA, 21 nt, Artificial Sequence
  GATA2 Guide RNA
auguuugagacccccggguca

SEQ ID NO: 38234 - RNA, 21 nt, Artificial Sequence
  GATA2 Guide RNA
auuagagcgagacaucaccca

SEQ ID NO: 38235 - RNA, 21 nt, Artificial Sequence
  GATA2 Guide RNA
auucagggagggaaaggggga

SEQ ID NO: 38236 - RNA, 21 nt, Artificial Sequence
  GATA2 Guide RNA
auucccccuuucccucccuga

SEQ ID NO: 38237 - RNA, 21 nt, Artificial Sequence
  GATA2 Guide RNA
auuccuguucuauguucuggu

SEQ ID NO: 38238 - RNA, 21 nt, Artificial Sequence
  GATA2 Guide RNA
auuugcguuuuuguggugggg

SEQ ID NO: 38239 - RNA, 21 nt, Artificial Sequence
  GATA2 Guide RNA
auuuucuuaagugcuuccagu

SEQ ID NO: 38240 - RNA, 21 nt, Artificial Sequence
  GATA2 Guide RNA
caaaaacgcaaaugcuccccu

SEQ ID NO: 38241 - RNA, 21 nt, Artificial Sequence
  GATA2 Guide RNA
caaaaguuuuagagucuccuc

SEQ ID NO: 38242 - RNA, 21 nt, Artificial Sequence
  GATA2 Guide RNA
caaacaucugcugggggcuau

SEQ ID NO: 38243 - RNA, 21 nt, Artificial Sequence
  GATA2 Guide RNA
caaaguucaguuccuugcccc

SEQ ID NO: 38244 - RNA, 21 nt, Artificial Sequence
  GATA2 Guide RNA
caaaugcuccccucuuccacg

SEQ ID NO: 38245 - RNA, 21 nt, Artificial Sequence
  GATA2 Guide RNA
caacacugccaccucucccaa

SEQ ID NO: 38246 - RNA, 21 nt, Artificial Sequence
  GATA2 Guide RNA
caacccuggggcaaggaacug

SEQ ID NO: 38247 - RNA, 21 nt, Artificial Sequence
  GATA2 Guide RNA
caaggaacugaacuuuggggg

SEQ ID NO: 38248 - RNA, 21 nt, Artificial Sequence
  GATA2 Guide RNA
caagucacagcuccccaccac

SEQ ID NO: 38249 - RNA, 21 nt, Artificial Sequence
  GATA2 Guide RNA
cacaaaaacgcaaaugcuccc

SEQ ID NO: 38250 - RNA, 21 nt, Artificial Sequence
  GATA2 Guide RNA
cacagcuccccaccacaaaaa

SEQ ID NO: 38251 - RNA, 21 nt, Artificial Sequence
  GATA2 Guide RNA
caccacaaaaacgcaaaugcu

SEQ ID NO: 38252 - RNA, 21 nt, Artificial Sequence
  GATA2 Guide RNA
cacccauccccagaucuggga

SEQ ID NO: 38253 - RNA, 21 nt, Artificial Sequence
  GATA2 Guide RNA
caccucucccaagucacagcu

SEQ ID NO: 38254 - RNA, 21 nt, Artificial Sequence
  GATA2 Guide RNA
cacugccaccucucccaaguc

SEQ ID NO: 38255 - RNA, 21 nt, Artificial Sequence
  GATA2 Guide RNA
cacugccugaccagaacauag

SEQ ID NO: 38256 - RNA, 21 nt, Artificial Sequence
  GATA2 Guide RNA
cacuggaagcacuuaagaaaa

SEQ ID NO: 38257 - RNA, 21 nt, Artificial Sequence
  GATA2 Guide RNA
cacuuaagaaaauggcaaaag

SEQ ID NO: 38258 - RNA, 21 nt, Artificial Sequence
  GATA2 Guide RNA
cacuuaagauucagggaggga

SEQ ID NO: 38259 - RNA, 21 nt, Artificial Sequence
  GATA2 Guide RNA
cagaacauagaacaggaauuc

SEQ ID NO: 38260 - RNA, 21 nt, Artificial Sequence
  GATA2 Guide RNA
cagaucugggaaaccaacacu

SEQ ID NO: 38261 - RNA, 21 nt, Artificial Sequence
  GATA2 Guide RNA
cagaucuggggaugggugaug

SEQ ID NO: 38262 - RNA, 21 nt, Artificial Sequence
  GATA2 Guide RNA
cagauguuugagacccccggg

SEQ ID NO: 38263 - RNA, 21 nt, Artificial Sequence
  GATA2 Guide RNA
cagcagauguuugagaccccc

SEQ ID NO: 38264 - RNA, 21 nt, Artificial Sequence
  GATA2 Guide RNA
cagcuccccaccacaaaaacg

SEQ ID NO: 38265 - RNA, 21 nt, Artificial Sequence
  GATA2 Guide RNA
caggaauucccccuuucccuc

SEQ ID NO: 38266 - RNA, 21 nt, Artificial Sequence
  GATA2 Guide RNA
caggcagugaccaacccuggg

SEQ ID NO: 38267 - RNA, 21 nt, Artificial Sequence
  GATA2 Guide RNA
cagggagaggagacucuaaaa

SEQ ID NO: 38268 - RNA, 21 nt, Artificial Sequence
  GATA2 Guide RNA
cagggagggaaagggggaauu

SEQ ID NO: 38269 - RNA, 21 nt, Artificial Sequence
  GATA2 Guide RNA
caggguuggucacugccugac

SEQ ID NO: 38270 - RNA, 21 nt, Artificial Sequence
  GATA2 Guide RNA
caggugcuggggacuucgugg

SEQ ID NO: 38271 - RNA, 21 nt, Artificial Sequence
  GATA2 Guide RNA
cagugaccaacccuggggcaa

SEQ ID NO: 38272 - RNA, 21 nt, Artificial Sequence
  GATA2 Guide RNA
caguguacccccaaaguucag

SEQ ID NO: 38273 - RNA, 21 nt, Artificial Sequence
  GATA2 Guide RNA
caguguugguuucccagaucu

SEQ ID NO: 38274 - RNA, 21 nt, Artificial Sequence
  GATA2 Guide RNA
caguuccuugccccaggguug

SEQ ID NO: 38275 - RNA, 21 nt, Artificial Sequence
  GATA2 Guide RNA
cauagaacaggaauucccccu

SEQ ID NO: 38276 - RNA, 21 nt, Artificial Sequence
  GATA2 Guide RNA
caucacccauccccagaucug

SEQ ID NO: 38277 - RNA, 21 nt, Artificial Sequence
  GATA2 Guide RNA
cauccccagaucugggaaacc

SEQ ID NO: 38278 - RNA, 21 nt, Artificial Sequence
  GATA2 Guide RNA
caucugcugggggcuauuaga

SEQ ID NO: 38279 - RNA, 21 nt, Artificial Sequence
  GATA2 Guide RNA
cauuugcguuuuugugguggg

SEQ ID NO: 38280 - RNA, 21 nt, Artificial Sequence
  GATA2 Guide RNA
cauuuucuuaagugcuuccag

SEQ ID NO: 38281 - RNA, 21 nt, Artificial Sequence
  GATA2 Guide RNA
ccaaaguucaguuccuugccc

SEQ ID NO: 38282 - RNA, 21 nt, Artificial Sequence
  GATA2 Guide RNA
ccaacacugccaccucuccca

SEQ ID NO: 38283 - RNA, 21 nt, Artificial Sequence
  GATA2 Guide RNA
ccaacccuggggcaaggaacu

SEQ ID NO: 38284 - RNA, 21 nt, Artificial Sequence
  GATA2 Guide RNA
ccaagucacagcuccccacca

SEQ ID NO: 38285 - RNA, 21 nt, Artificial Sequence
  GATA2 Guide RNA
ccacaaaaacgcaaaugcucc

SEQ ID NO: 38286 - RNA, 21 nt, Artificial Sequence
  GATA2 Guide RNA
ccaccacaaaaacgcaaaugc

SEQ ID NO: 38287 - RNA, 21 nt, Artificial Sequence
  GATA2 Guide RNA
ccaccucucccaagucacagc

SEQ ID NO: 38288 - RNA, 21 nt, Artificial Sequence
  GATA2 Guide RNA
ccagaacauagaacaggaauu

SEQ ID NO: 38289 - RNA, 21 nt, Artificial Sequence
  GATA2 Guide RNA
ccagaucugggaaaccaacac

SEQ ID NO: 38290 - RNA, 21 nt, Artificial Sequence
  GATA2 Guide RNA
ccagaucuggggaugggugau

SEQ ID NO: 38291 - RNA, 21 nt, Artificial Sequence
  GATA2 Guide RNA
ccagcagauguuugagacccc

SEQ ID NO: 38292 - RNA, 21 nt, Artificial Sequence
  GATA2 Guide RNA
ccaggguuggucacugccuga

SEQ ID NO: 38293 - RNA, 21 nt, Artificial Sequence
  GATA2 Guide RNA
ccaguguacccccaaaguuca

SEQ ID NO: 38294 - RNA, 21 nt, Artificial Sequence
  GATA2 Guide RNA
ccauccccagaucugggaaac

SEQ ID NO: 38295 - RNA, 21 nt, Artificial Sequence
  GATA2 Guide RNA
ccauuuucuuaagugcuucca

SEQ ID NO: 38296 - RNA, 21 nt, Artificial Sequence
  GATA2 Guide RNA
cccaaaguucaguuccuugcc

SEQ ID NO: 38297 - RNA, 21 nt, Artificial Sequence
  GATA2 Guide RNA
cccaagucacagcuccccacc

SEQ ID NO: 38298 - RNA, 21 nt, Artificial Sequence
  GATA2 Guide RNA
cccaccacaaaaacgcaaaug

SEQ ID NO: 38299 - RNA, 21 nt, Artificial Sequence
  GATA2 Guide RNA
cccagaucugggaaaccaaca

SEQ ID NO: 38300 - RNA, 21 nt, Artificial Sequence
  GATA2 Guide RNA
cccagaucuggggauggguga

SEQ ID NO: 38301 - RNA, 21 nt, Artificial Sequence
  GATA2 Guide RNA
cccagcagauguuugagaccc

SEQ ID NO: 38302 - RNA, 21 nt, Artificial Sequence
  GATA2 Guide RNA
cccaggguuggucacugccug

SEQ ID NO: 38303 - RNA, 21 nt, Artificial Sequence
  GATA2 Guide RNA
cccauccccagaucugggaaa

SEQ ID NO: 38304 - RNA, 21 nt, Artificial Sequence
  GATA2 Guide RNA
ccccaaaguucaguuccuugc

SEQ ID NO: 38305 - RNA, 21 nt, Artificial Sequence
  GATA2 Guide RNA
ccccaccacaaaaacgcaaau

SEQ ID NO: 38306 - RNA, 21 nt, Artificial Sequence
  GATA2 Guide RNA
ccccagaucugggaaaccaac

SEQ ID NO: 38307 - RNA, 21 nt, Artificial Sequence
  GATA2 Guide RNA
ccccagcagauguuugagacc

SEQ ID NO: 38308 - RNA, 21 nt, Artificial Sequence
  GATA2 Guide RNA
ccccaggguuggucacugccu

SEQ ID NO: 38309 - RNA, 21 nt, Artificial Sequence
  GATA2 Guide RNA
cccccaaaguucaguuccuug

SEQ ID NO: 38310 - RNA, 21 nt, Artificial Sequence
  GATA2 Guide RNA
cccccagcagauguuugagac

SEQ ID NO: 38311 - RNA, 21 nt, Artificial Sequence
  GATA2 Guide RNA
cccccgggucagggagaggag

SEQ ID NO: 38312 - RNA, 21 nt, Artificial Sequence
  GATA2 Guide RNA
cccccuuucccucccugaauc

SEQ ID NO: 38313 - RNA, 21 nt, Artificial Sequence
  GATA2 Guide RNA
ccccgggucagggagaggaga

SEQ ID NO: 38314 - RNA, 21 nt, Artificial Sequence
  GATA2 Guide RNA
ccccucuuccacgaagucccc

SEQ ID NO: 38315 - RNA, 21 nt, Artificial Sequence
  GATA2 Guide RNA
ccccuuucccucccugaaucu

SEQ ID NO: 38316 - RNA, 21 nt, Artificial Sequence
  GATA2 Guide RNA
cccgggggucucaaacaucug

SEQ ID NO: 38317 - RNA, 21 nt, Artificial Sequence
  GATA2 Guide RNA
cccgggucagggagaggagac

SEQ ID NO: 38318 - RNA, 21 nt, Artificial Sequence
  GATA2 Guide RNA
cccucuuccacgaagucccca

SEQ ID NO: 38319 - RNA, 21 nt, Artificial Sequence
  GATA2 Guide RNA
cccugacccgggggucucaaa

SEQ ID NO: 38320 - RNA, 21 nt, Artificial Sequence
  GATA2 Guide RNA
cccuggggcaaggaacugaac

SEQ ID NO: 38321 - RNA, 21 nt, Artificial Sequence
  GATA2 Guide RNA
cccuuucccucccugaaucuu

SEQ ID NO: 38322 - RNA, 21 nt, Artificial Sequence
  GATA2 Guide RNA
ccgggggucucaaacaucugc

SEQ ID NO: 38323 - RNA, 21 nt, Artificial Sequence
  GATA2 Guide RNA
ccgggucagggagaggagacu

SEQ ID NO: 38324 - RNA, 21 nt, Artificial Sequence
  GATA2 Guide RNA
ccucucccaagucacagcucc

SEQ ID NO: 38325 - RNA, 21 nt, Artificial Sequence
  GATA2 Guide RNA
ccucucccugacccggggguc

SEQ ID NO: 38326 - RNA, 21 nt, Artificial Sequence
  GATA2 Guide RNA
ccucuuccacgaaguccccag

SEQ ID NO: 38327 - RNA, 21 nt, Artificial Sequence
  GATA2 Guide RNA
ccugaccagaacauagaacag

SEQ ID NO: 38328 - RNA, 21 nt, Artificial Sequence
  GATA2 Guide RNA
ccugacccgggggucucaaac

SEQ ID NO: 38329 - RNA, 21 nt, Artificial Sequence
  GATA2 Guide RNA
ccuggggcaaggaacugaacu

SEQ ID NO: 38330 - RNA, 21 nt, Artificial Sequence
  GATA2 Guide RNA
ccuguucuauguucuggucag

SEQ ID NO: 38331 - RNA, 21 nt, Artificial Sequence
  GATA2 Guide RNA
ccuugccccaggguuggucac

SEQ ID NO: 38332 - RNA, 21 nt, Artificial Sequence
  GATA2 Guide RNA
ccuuucccucccugaaucuua

SEQ ID NO: 38333 - RNA, 21 nt, Artificial Sequence
  GATA2 Guide RNA
cgagacaucacccauccccag

SEQ ID NO: 38334 - RNA, 21 nt, Artificial Sequence
  GATA2 Guide RNA
cgcaaaugcuccccucuucca

SEQ ID NO: 38335 - RNA, 21 nt, Artificial Sequence
  GATA2 Guide RNA
cgcucuaauagcccccagcag

SEQ ID NO: 38336 - RNA, 21 nt, Artificial Sequence
  GATA2 Guide RNA
cgggggucucaaacaucugcu

SEQ ID NO: 38337 - RNA, 21 nt, Artificial Sequence
  GATA2 Guide RNA
cgggucagggagaggagacuc

SEQ ID NO: 38338 - RNA, 21 nt, Artificial Sequence
  GATA2 Guide RNA
cguggaagaggggagcauuug

SEQ ID NO: 38339 - RNA, 21 nt, Artificial Sequence
  GATA2 Guide RNA
cguuuuugugguggggagcug

SEQ ID NO: 38340 - RNA, 21 nt, Artificial Sequence
  GATA2 Guide RNA
cuaauagcccccagcagaugu

SEQ ID NO: 38341 - RNA, 21 nt, Artificial Sequence
  GATA2 Guide RNA
cuauguucuggucaggcagug

SEQ ID NO: 38342 - RNA, 21 nt, Artificial Sequence
  GATA2 Guide RNA
cuauuagagcgagacaucacc

SEQ ID NO: 38343 - RNA, 21 nt, Artificial Sequence
  GATA2 Guide RNA
cucaaacaucugcugggggcu

SEQ ID NO: 38344 - RNA, 21 nt, Artificial Sequence
  GATA2 Guide RNA
cucccaagucacagcucccca

SEQ ID NO: 38345 - RNA, 21 nt, Artificial Sequence
  GATA2 Guide RNA
cuccccaccacaaaaacgcaa

SEQ ID NO: 38346 - RNA, 21 nt, Artificial Sequence
  GATA2 Guide RNA
cuccccucuuccacgaagucc

SEQ ID NO: 38347 - RNA, 21 nt, Artificial Sequence
  GATA2 Guide RNA
cucccugacccgggggucuca

SEQ ID NO: 38348 - RNA, 21 nt, Artificial Sequence
  GATA2 Guide RNA
cuccucucccugacccggggg

SEQ ID NO: 38349 - RNA, 21 nt, Artificial Sequence
  GATA2 Guide RNA
cucgcucuaauagcccccagc

SEQ ID NO: 38350 - RNA, 21 nt, Artificial Sequence
  GATA2 Guide RNA
cucuaauagcccccagcagau

SEQ ID NO: 38351 - RNA, 21 nt, Artificial Sequence
  GATA2 Guide RNA
cucucccaagucacagcuccc

SEQ ID NO: 38352 - RNA, 21 nt, Artificial Sequence
  GATA2 Guide RNA
cucucccugacccgggggucu

SEQ ID NO: 38353 - RNA, 21 nt, Artificial Sequence
  GATA2 Guide RNA
cucuuccacgaaguccccagc

SEQ ID NO: 38354 - RNA, 21 nt, Artificial Sequence
  GATA2 Guide RNA
cugaacuuuggggguacacug

SEQ ID NO: 38355 - RNA, 21 nt, Artificial Sequence
  GATA2 Guide RNA
cugaccagaacauagaacagg

SEQ ID NO: 38356 - RNA, 21 nt, Artificial Sequence
  GATA2 Guide RNA
cugacccgggggucucaaaca

SEQ ID NO: 38357 - RNA, 21 nt, Artificial Sequence
  GATA2 Guide RNA
cugccaccucucccaagucac

SEQ ID NO: 38358 - RNA, 21 nt, Artificial Sequence
  GATA2 Guide RNA
cugccugaccagaacauagaa

SEQ ID NO: 38359 - RNA, 21 nt, Artificial Sequence
  GATA2 Guide RNA
cugcugggggcuauuagagcg

SEQ ID NO: 38360 - RNA, 21 nt, Artificial Sequence
  GATA2 Guide RNA
cuggaagcacuuaagaaaaug

SEQ ID NO: 38361 - RNA, 21 nt, Artificial Sequence
  GATA2 Guide RNA
cugggaaaccaacacugccac

SEQ ID NO: 38362 - RNA, 21 nt, Artificial Sequence
  GATA2 Guide RNA
cuggggacuucguggaagagg

SEQ ID NO: 38363 - RNA, 21 nt, Artificial Sequence
  GATA2 Guide RNA
cuggggaugggugaugucucg

SEQ ID NO: 38364 - RNA, 21 nt, Artificial Sequence
  GATA2 Guide RNA
cuggggcaaggaacugaacuu

SEQ ID NO: 38365 - RNA, 21 nt, Artificial Sequence
  GATA2 Guide RNA
cugggggcuauuagagcgaga

SEQ ID NO: 38366 - RNA, 21 nt, Artificial Sequence
  GATA2 Guide RNA
cuggucaggcagugaccaacc

SEQ ID NO: 38367 - RNA, 21 nt, Artificial Sequence
  GATA2 Guide RNA
cugugacuugggagagguggc

SEQ ID NO: 38368 - RNA, 21 nt, Artificial Sequence
  GATA2 Guide RNA
cuguucuauguucuggucagg

SEQ ID NO: 38369 - RNA, 21 nt, Artificial Sequence
  GATA2 Guide RNA
cuuaagauucagggagggaaa

SEQ ID NO: 38370 - RNA, 21 nt, Artificial Sequence
  GATA2 Guide RNA
cuuaagugcuuccaguguacc

SEQ ID NO: 38371 - RNA, 21 nt, Artificial Sequence
  GATA2 Guide RNA
cuuccacgaaguccccagcac

SEQ ID NO: 38372 - RNA, 21 nt, Artificial Sequence
  GATA2 Guide RNA
cuuccaguguacccccaaagu

SEQ ID NO: 38373 - RNA, 21 nt, Artificial Sequence
  GATA2 Guide RNA
cuucguggaagaggggagcau

SEQ ID NO: 38374 - RNA, 21 nt, Artificial Sequence
  GATA2 Guide RNA
cuugccccaggguuggucacu

SEQ ID NO: 38375 - RNA, 21 nt, Artificial Sequence
  GATA2 Guide RNA
cuugggagagguggcaguguu

SEQ ID NO: 38376 - RNA, 21 nt, Artificial Sequence
  GATA2 Guide RNA
cuuucccucccugaaucuuaa

SEQ ID NO: 38377 - RNA, 21 nt, Artificial Sequence
  GATA2 Guide RNA
cuuuggggguacacuggaagc

SEQ ID NO: 38378 - RNA, 21 nt, Artificial Sequence
  GATA2 Guide RNA
cuuuugccauuuucuuaagug

SEQ ID NO: 38379 - RNA, 21 nt, Artificial Sequence
  GATA2 Guide RNA
gaaaccaacacugccaccucu

SEQ ID NO: 38380 - RNA, 21 nt, Artificial Sequence
  GATA2 Guide RNA
gaaagggggaauuccuguucu

SEQ ID NO: 38381 - RNA, 21 nt, Artificial Sequence
  GATA2 Guide RNA
gaacaggaauucccccuuucc

SEQ ID NO: 38382 - RNA, 21 nt, Artificial Sequence
  GATA2 Guide RNA
gaacauagaacaggaauuccc

SEQ ID NO: 38383 - RNA, 21 nt, Artificial Sequence
  GATA2 Guide RNA
gaacugaacuuuggggguaca

SEQ ID NO: 38384 - RNA, 21 nt, Artificial Sequence
  GATA2 Guide RNA
gaacuuuggggguacacugga

SEQ ID NO: 38385 - RNA, 21 nt, Artificial Sequence
  GATA2 Guide RNA
gaagaggggagcauuugcguu

SEQ ID NO: 38386 - RNA, 21 nt, Artificial Sequence
  GATA2 Guide RNA
gaagcacuuaagaaaauggca

SEQ ID NO: 38387 - RNA, 21 nt, Artificial Sequence
  GATA2 Guide RNA
gaauucccccuuucccucccu

SEQ ID NO: 38388 - RNA, 21 nt, Artificial Sequence
  GATA2 Guide RNA
gaauuccuguucuauguucug

SEQ ID NO: 38389 - RNA, 21 nt, Artificial Sequence
  GATA2 Guide RNA
gacaucacccauccccagauc

SEQ ID NO: 38390 - RNA, 21 nt, Artificial Sequence
  GATA2 Guide RNA
gaccaacccuggggcaaggaa

SEQ ID NO: 38391 - RNA, 21 nt, Artificial Sequence
  GATA2 Guide RNA
gaccagaacauagaacaggaa

SEQ ID NO: 38392 - RNA, 21 nt, Artificial Sequence
  GATA2 Guide RNA
gacccccgggucagggagagg

SEQ ID NO: 38393 - RNA, 21 nt, Artificial Sequence
  GATA2 Guide RNA
gacccgggggucucaaacauc

SEQ ID NO: 38394 - RNA, 21 nt, Artificial Sequence
  GATA2 Guide RNA
gacucuaaaacuuuugccauu

SEQ ID NO: 38395 - RNA, 21 nt, Artificial Sequence
  GATA2 Guide RNA
gacuucguggaagaggggagc

SEQ ID NO: 38396 - RNA, 21 nt, Artificial Sequence
  GATA2 Guide RNA
gacuugggagagguggcagug

SEQ ID NO: 38397 - RNA, 21 nt, Artificial Sequence
  GATA2 Guide RNA
gagacaucacccauccccaga

SEQ ID NO: 38398 - RNA, 21 nt, Artificial Sequence
  GATA2 Guide RNA
gagacccccgggucagggaga

SEQ ID NO: 38399 - RNA, 21 nt, Artificial Sequence
  GATA2 Guide RNA
gagacucuaaaacuuuugcca

SEQ ID NO: 38400 - RNA, 21 nt, Artificial Sequence
  GATA2 Guide RNA
gagaggagacucuaaaacuuu

SEQ ID NO: 38401 - RNA, 21 nt, Artificial Sequence
  GATA2 Guide RNA
gagagguggcaguguugguuu

SEQ ID NO: 38402 - RNA, 21 nt, Artificial Sequence
  GATA2 Guide RNA
gagcauuugcguuuuuguggu

SEQ ID NO: 38403 - RNA, 21 nt, Artificial Sequence
  GATA2 Guide RNA
gagcgagacaucacccauccc

SEQ ID NO: 38404 - RNA, 21 nt, Artificial Sequence
  GATA2 Guide RNA
gagcugugacuugggagaggu

SEQ ID NO: 38405 - RNA, 21 nt, Artificial Sequence
  GATA2 Guide RNA
gaggagacucuaaaacuuuug

SEQ ID NO: 38406 - RNA, 21 nt, Artificial Sequence
  GATA2 Guide RNA
gagggaaagggggaauuccug

SEQ ID NO: 38407 - RNA, 21 nt, Artificial Sequence
  GATA2 Guide RNA
gaggggagcauuugcguuuuu

SEQ ID NO: 38408 - RNA, 21 nt, Artificial Sequence
  GATA2 Guide RNA
gagguggcaguguugguuucc

SEQ ID NO: 38409 - RNA, 21 nt, Artificial Sequence
  GATA2 Guide RNA
gagucuccucucccugacccg

SEQ ID NO: 38410 - RNA, 21 nt, Artificial Sequence
  GATA2 Guide RNA
gaucugggaaaccaacacugc

SEQ ID NO: 38411 - RNA, 21 nt, Artificial Sequence
  GATA2 Guide RNA
gaucuggggaugggugauguc

SEQ ID NO: 38412 - RNA, 21 nt, Artificial Sequence
  GATA2 Guide RNA
gaugggugaugucucgcucua

SEQ ID NO: 38413 - RNA, 21 nt, Artificial Sequence
  GATA2 Guide RNA
gaugucucgcucuaauagccc

SEQ ID NO: 38414 - RNA, 21 nt, Artificial Sequence
  GATA2 Guide RNA
gauguuugagacccccggguc

SEQ ID NO: 38415 - RNA, 21 nt, Artificial Sequence
  GATA2 Guide RNA
gauucagggagggaaaggggg

SEQ ID NO: 38416 - RNA, 21 nt, Artificial Sequence
  GATA2 Guide RNA
gcaaaaguuuuagagucuccu

SEQ ID NO: 38417 - RNA, 21 nt, Artificial Sequence
  GATA2 Guide RNA
gcaaaugcuccccucuuccac

SEQ ID NO: 38418 - RNA, 21 nt, Artificial Sequence
  GATA2 Guide RNA
gcaaggaacugaacuuugggg

SEQ ID NO: 38419 - RNA, 21 nt, Artificial Sequence
  GATA2 Guide RNA
gcacuuaagaaaauggcaaaa

SEQ ID NO: 38420 - RNA, 21 nt, Artificial Sequence
  GATA2 Guide RNA
gcagauguuugagacccccgg

SEQ ID NO: 38421 - RNA, 21 nt, Artificial Sequence
  GATA2 Guide RNA
gcaggugcuggggacuucgug

SEQ ID NO: 38422 - RNA, 21 nt, Artificial Sequence
  GATA2 Guide RNA
gcagugaccaacccuggggca

SEQ ID NO: 38423 - RNA, 21 nt, Artificial Sequence
  GATA2 Guide RNA
gcaguguugguuucccagauc

SEQ ID NO: 38424 - RNA, 21 nt, Artificial Sequence
  GATA2 Guide RNA
gcauuugcguuuuuguggugg

SEQ ID NO: 38425 - RNA, 21 nt, Artificial Sequence
  GATA2 Guide RNA
gccaccucucccaagucacag

SEQ ID NO: 38426 - RNA, 21 nt, Artificial Sequence
  GATA2 Guide RNA
gccauuuucuuaagugcuucc

SEQ ID NO: 38427 - RNA, 21 nt, Artificial Sequence
  GATA2 Guide RNA
gccccaggguuggucacugcc

SEQ ID NO: 38428 - RNA, 21 nt, Artificial Sequence
  GATA2 Guide RNA
gcccccagcagauguuugaga

SEQ ID NO: 38429 - RNA, 21 nt, Artificial Sequence
  GATA2 Guide RNA
gccugaccagaacauagaaca

SEQ ID NO: 38430 - RNA, 21 nt, Artificial Sequence
  GATA2 Guide RNA
gcgagacaucacccaucccca

SEQ ID NO: 38431 - RNA, 21 nt, Artificial Sequence
  GATA2 Guide RNA
gcguuuuugugguggggagcu

SEQ ID NO: 38432 - RNA, 21 nt, Artificial Sequence
  GATA2 Guide RNA
gcuauuagagcgagacaucac

SEQ ID NO: 38433 - RNA, 21 nt, Artificial Sequence
  GATA2 Guide RNA
gcuccccaccacaaaaacgca

SEQ ID NO: 38434 - RNA, 21 nt, Artificial Sequence
  GATA2 Guide RNA
gcuccccucuuccacgaaguc

SEQ ID NO: 38435 - RNA, 21 nt, Artificial Sequence
  GATA2 Guide RNA
gcucuaauagcccccagcaga

SEQ ID NO: 38436 - RNA, 21 nt, Artificial Sequence
  GATA2 Guide RNA
gcuggggacuucguggaagag

SEQ ID NO: 38437 - RNA, 21 nt, Artificial Sequence
  GATA2 Guide RNA
gcugggggcuauuagagcgag

SEQ ID NO: 38438 - RNA, 21 nt, Artificial Sequence
  GATA2 Guide RNA
gcugugacuugggagaggugg

SEQ ID NO: 38439 - RNA, 21 nt, Artificial Sequence
  GATA2 Guide RNA
gcuuccaguguacccccaaag

SEQ ID NO: 38440 - RNA, 21 nt, Artificial Sequence
  GATA2 Guide RNA
ggaaaccaacacugccaccuc

SEQ ID NO: 38441 - RNA, 21 nt, Artificial Sequence
  GATA2 Guide RNA
ggaaagggggaauuccuguuc

SEQ ID NO: 38442 - RNA, 21 nt, Artificial Sequence
  GATA2 Guide RNA
ggaacugaacuuuggggguac

SEQ ID NO: 38443 - RNA, 21 nt, Artificial Sequence
  GATA2 Guide RNA
ggaagaggggagcauuugcgu

SEQ ID NO: 38444 - RNA, 21 nt, Artificial Sequence
  GATA2 Guide RNA
ggaagcacuuaagaaaauggc

SEQ ID NO: 38445 - RNA, 21 nt, Artificial Sequence
  GATA2 Guide RNA
ggaauucccccuuucccuccc

SEQ ID NO: 38446 - RNA, 21 nt, Artificial Sequence
  GATA2 Guide RNA
ggaauuccuguucuauguucu

SEQ ID NO: 38447 - RNA, 21 nt, Artificial Sequence
  GATA2 Guide RNA
ggacuucguggaagaggggag

SEQ ID NO: 38448 - RNA, 21 nt, Artificial Sequence
  GATA2 Guide RNA
ggagacucuaaaacuuuugcc

SEQ ID NO: 38449 - RNA, 21 nt, Artificial Sequence
  GATA2 Guide RNA
ggagaggagacucuaaaacuu

SEQ ID NO: 38450 - RNA, 21 nt, Artificial Sequence
  GATA2 Guide RNA
ggagagguggcaguguugguu

SEQ ID NO: 38451 - RNA, 21 nt, Artificial Sequence
  GATA2 Guide RNA
ggagcauuugcguuuuugugg

SEQ ID NO: 38452 - RNA, 21 nt, Artificial Sequence
  GATA2 Guide RNA
ggagcugugacuugggagagg

SEQ ID NO: 38453 - RNA, 21 nt, Artificial Sequence
  GATA2 Guide RNA
ggagggaaagggggaauuccu

SEQ ID NO: 38454 - RNA, 21 nt, Artificial Sequence
  GATA2 Guide RNA
ggaugggugaugucucgcucu

SEQ ID NO: 38455 - RNA, 21 nt, Artificial Sequence
  GATA2 Guide RNA
ggcaaaaguuuuagagucucc

SEQ ID NO: 38456 - RNA, 21 nt, Artificial Sequence
  GATA2 Guide RNA
ggcaaggaacugaacuuuggg

SEQ ID NO: 38457 - RNA, 21 nt, Artificial Sequence
  GATA2 Guide RNA
ggcaggugcuggggacuucgu

SEQ ID NO: 38458 - RNA, 21 nt, Artificial Sequence
  GATA2 Guide RNA
ggcagugaccaacccuggggc

SEQ ID NO: 38459 - RNA, 21 nt, Artificial Sequence
  GATA2 Guide RNA
ggcaguguugguuucccagau

SEQ ID NO: 38460 - RNA, 21 nt, Artificial Sequence
  GATA2 Guide RNA
ggcuauuagagcgagacauca

SEQ ID NO: 38461 - RNA, 21 nt, Artificial Sequence
  GATA2 Guide RNA
gggaaaccaacacugccaccu

SEQ ID NO: 38462 - RNA, 21 nt, Artificial Sequence
  GATA2 Guide RNA
gggaaagggggaauuccuguu

SEQ ID NO: 38463 - RNA, 21 nt, Artificial Sequence
  GATA2 Guide RNA
gggaauuccuguucuauguuc

SEQ ID NO: 38464 - RNA, 21 nt, Artificial Sequence
  GATA2 Guide RNA
gggacuucguggaagagggga

SEQ ID NO: 38465 - RNA, 21 nt, Artificial Sequence
  GATA2 Guide RNA
gggagaggagacucuaaaacu

SEQ ID NO: 38466 - RNA, 21 nt, Artificial Sequence
  GATA2 Guide RNA
gggagagguggcaguguuggu

SEQ ID NO: 38467 - RNA, 21 nt, Artificial Sequence
  GATA2 Guide RNA
gggagcauuugcguuuuugug

SEQ ID NO: 38468 - RNA, 21 nt, Artificial Sequence
  GATA2 Guide RNA
gggagcugugacuugggagag

SEQ ID NO: 38469 - RNA, 21 nt, Artificial Sequence
  GATA2 Guide RNA
gggagggaaagggggaauucc

SEQ ID NO: 38470 - RNA, 21 nt, Artificial Sequence
  GATA2 Guide RNA
gggaugggugaugucucgcuc

SEQ ID NO: 38471 - RNA, 21 nt, Artificial Sequence
  GATA2 Guide RNA
gggcaaggaacugaacuuugg

SEQ ID NO: 38472 - RNA, 21 nt, Artificial Sequence
  GATA2 Guide RNA
gggcuauuagagcgagacauc

SEQ ID NO: 38473 - RNA, 21 nt, Artificial Sequence
  GATA2 Guide RNA
ggggaauuccuguucuauguu

SEQ ID NO: 38474 - RNA, 21 nt, Artificial Sequence
  GATA2 Guide RNA
ggggacuucguggaagagggg

SEQ ID NO: 38475 - RNA, 21 nt, Artificial Sequence
  GATA2 Guide RNA
ggggagcauuugcguuuuugu

SEQ ID NO: 38476 - RNA, 21 nt, Artificial Sequence
  GATA2 Guide RNA
ggggagcugugacuugggaga

SEQ ID NO: 38477 - RNA, 21 nt, Artificial Sequence
  GATA2 Guide RNA
ggggaugggugaugucucgcu

SEQ ID NO: 38478 - RNA, 21 nt, Artificial Sequence
  GATA2 Guide RNA
ggggcaaggaacugaacuuug

SEQ ID NO: 38479 - RNA, 21 nt, Artificial Sequence
  GATA2 Guide RNA
ggggcuauuagagcgagacau

SEQ ID NO: 38480 - RNA, 21 nt, Artificial Sequence
  GATA2 Guide RNA
gggggaauuccuguucuaugu

SEQ ID NO: 38481 - RNA, 21 nt, Artificial Sequence
  GATA2 Guide RNA
gggggcuauuagagcgagaca

SEQ ID NO: 38482 - RNA, 21 nt, Artificial Sequence
  GATA2 Guide RNA
ggggguacacuggaagcacuu

SEQ ID NO: 38483 - RNA, 21 nt, Artificial Sequence
  GATA2 Guide RNA
gggggucucaaacaucugcug

SEQ ID NO: 38484 - RNA, 21 nt, Artificial Sequence
  GATA2 Guide RNA
gggguacacuggaagcacuua

SEQ ID NO: 38485 - RNA, 21 nt, Artificial Sequence
  GATA2 Guide RNA
ggggucucaaacaucugcugg

SEQ ID NO: 38486 - RNA, 21 nt, Artificial Sequence
  GATA2 Guide RNA
ggguacacuggaagcacuuaa

SEQ ID NO: 38487 - RNA, 21 nt, Artificial Sequence
  GATA2 Guide RNA
gggucagggagaggagacucu

SEQ ID NO: 38488 - RNA, 21 nt, Artificial Sequence
  GATA2 Guide RNA
gggucucaaacaucugcuggg

SEQ ID NO: 38489 - RNA, 21 nt, Artificial Sequence
  GATA2 Guide RNA
gggugaugucucgcucuaaua

SEQ ID NO: 38490 - RNA, 21 nt, Artificial Sequence
  GATA2 Guide RNA
ggguuggucacugccugacca

SEQ ID NO: 38491 - RNA, 21 nt, Artificial Sequence
  GATA2 Guide RNA
gguacacuggaagcacuuaag

SEQ ID NO: 38492 - RNA, 21 nt, Artificial Sequence
  GATA2 Guide RNA
ggucacugccugaccagaaca

SEQ ID NO: 38493 - RNA, 21 nt, Artificial Sequence
  GATA2 Guide RNA
ggucaggcagugaccaacccu

SEQ ID NO: 38494 - RNA, 21 nt, Artificial Sequence
  GATA2 Guide RNA
ggucagggagaggagacucua

SEQ ID NO: 38495 - RNA, 21 nt, Artificial Sequence
  GATA2 Guide RNA
ggucucaaacaucugcugggg

SEQ ID NO: 38496 - RNA, 21 nt, Artificial Sequence
  GATA2 Guide RNA
ggugaugucucgcucuaauag

SEQ ID NO: 38497 - RNA, 21 nt, Artificial Sequence
  GATA2 Guide RNA
ggugcuggggacuucguggaa

SEQ ID NO: 38498 - RNA, 21 nt, Artificial Sequence
  GATA2 Guide RNA
gguggcaguguugguuuccca

SEQ ID NO: 38499 - RNA, 21 nt, Artificial Sequence
  GATA2 Guide RNA
gguggggagcugugacuuggg

SEQ ID NO: 38500 - RNA, 21 nt, Artificial Sequence
  GATA2 Guide RNA
gguuggucacugccugaccag

SEQ ID NO: 38501 - RNA, 21 nt, Artificial Sequence
  GATA2 Guide RNA
gguuucccagaucuggggaug

SEQ ID NO: 38502 - RNA, 21 nt, Artificial Sequence
  GATA2 Guide RNA
guacacuggaagcacuuaaga

SEQ ID NO: 38503 - RNA, 21 nt, Artificial Sequence
  GATA2 Guide RNA
guacccccaaaguucaguucc

SEQ ID NO: 38504 - RNA, 21 nt, Artificial Sequence
  GATA2 Guide RNA
gucacagcuccccaccacaaa

SEQ ID NO: 38505 - RNA, 21 nt, Artificial Sequence
  GATA2 Guide RNA
gucacugccugaccagaacau

SEQ ID NO: 38506 - RNA, 21 nt, Artificial Sequence
  GATA2 Guide RNA
gucaggcagugaccaacccug

SEQ ID NO: 38507 - RNA, 21 nt, Artificial Sequence
  GATA2 Guide RNA
gucagggagaggagacucuaa

SEQ ID NO: 38508 - RNA, 21 nt, Artificial Sequence
  GATA2 Guide RNA
gucucaaacaucugcuggggg

SEQ ID NO: 38509 - RNA, 21 nt, Artificial Sequence
  GATA2 Guide RNA
gucuccucucccugacccggg

SEQ ID NO: 38510 - RNA, 21 nt, Artificial Sequence
  GATA2 Guide RNA
gucucgcucuaauagccccca

SEQ ID NO: 38511 - RNA, 21 nt, Artificial Sequence
  GATA2 Guide RNA
gugaccaacccuggggcaagg

SEQ ID NO: 38512 - RNA, 21 nt, Artificial Sequence
  GATA2 Guide RNA
gugacuugggagagguggcag

SEQ ID NO: 38513 - RNA, 21 nt, Artificial Sequence
  GATA2 Guide RNA
gugaugucucgcucuaauagc

SEQ ID NO: 38514 - RNA, 21 nt, Artificial Sequence
  GATA2 Guide RNA
gugcuggggacuucguggaag

SEQ ID NO: 38515 - RNA, 21 nt, Artificial Sequence
  GATA2 Guide RNA
gugcuuccaguguacccccaa

SEQ ID NO: 38516 - RNA, 21 nt, Artificial Sequence
  GATA2 Guide RNA
guggaagaggggagcauuugc

SEQ ID NO: 38517 - RNA, 21 nt, Artificial Sequence
  GATA2 Guide RNA
guggcaguguugguuucccag

SEQ ID NO: 38518 - RNA, 21 nt, Artificial Sequence
  GATA2 Guide RNA
guggggagcugugacuuggga

SEQ ID NO: 38519 - RNA, 21 nt, Artificial Sequence
  GATA2 Guide RNA
gugguggggagcugugacuug

SEQ ID NO: 38520 - RNA, 21 nt, Artificial Sequence
  GATA2 Guide RNA
guguacccccaaaguucaguu

SEQ ID NO: 38521 - RNA, 21 nt, Artificial Sequence
  GATA2 Guide RNA
guguugguuucccagaucugg

SEQ ID NO: 38522 - RNA, 21 nt, Artificial Sequence
  GATA2 Guide RNA
guucaguuccuugccccaggg

SEQ ID NO: 38523 - RNA, 21 nt, Artificial Sequence
  GATA2 Guide RNA
guuccuugccccaggguuggu

SEQ ID NO: 38524 - RNA, 21 nt, Artificial Sequence
  GATA2 Guide RNA
guucuauguucuggucaggca

SEQ ID NO: 38525 - RNA, 21 nt, Artificial Sequence
  GATA2 Guide RNA
guucuggucaggcagugacca

SEQ ID NO: 38526 - RNA, 21 nt, Artificial Sequence
  GATA2 Guide RNA
guuggucacugccugaccaga

SEQ ID NO: 38527 - RNA, 21 nt, Artificial Sequence
  GATA2 Guide RNA
guugguuucccagaucugggg

SEQ ID NO: 38528 - RNA, 21 nt, Artificial Sequence
  GATA2 Guide RNA
guuucccagaucuggggaugg

SEQ ID NO: 38529 - RNA, 21 nt, Artificial Sequence
  GATA2 Guide RNA
guuugagacccccgggucagg

SEQ ID NO: 38530 - RNA, 21 nt, Artificial Sequence
  GATA2 Guide RNA
guuuuagagucuccucucccu

SEQ ID NO: 38531 - RNA, 21 nt, Artificial Sequence
  GATA2 Guide RNA
guuuuugugguggggagcugu

SEQ ID NO: 38532 - RNA, 21 nt, Artificial Sequence
  GATA2 Guide RNA
uaagauucagggagggaaagg

SEQ ID NO: 38533 - RNA, 21 nt, Artificial Sequence
  GATA2 Guide RNA
uaagugcuuccaguguacccc

SEQ ID NO: 38534 - RNA, 21 nt, Artificial Sequence
  GATA2 Guide RNA
uaauagcccccagcagauguu

SEQ ID NO: 38535 - RNA, 21 nt, Artificial Sequence
  GATA2 Guide RNA
uacacuggaagcacuuaagaa

SEQ ID NO: 38536 - RNA, 21 nt, Artificial Sequence
  GATA2 Guide RNA
uacccccaaaguucaguuccu

SEQ ID NO: 38537 - RNA, 21 nt, Artificial Sequence
  GATA2 Guide RNA
uagaacaggaauucccccuuu

SEQ ID NO: 38538 - RNA, 21 nt, Artificial Sequence
  GATA2 Guide RNA
uagagcgagacaucacccauc

SEQ ID NO: 38539 - RNA, 21 nt, Artificial Sequence
  GATA2 Guide RNA
uagagucuccucucccugacc

SEQ ID NO: 38540 - RNA, 21 nt, Artificial Sequence
  GATA2 Guide RNA
uagcccccagcagauguuuga

SEQ ID NO: 38541 - RNA, 21 nt, Artificial Sequence
  GATA2 Guide RNA
uauguucuggucaggcaguga

SEQ ID NO: 38542 - RNA, 21 nt, Artificial Sequence
  GATA2 Guide RNA
uauuagagcgagacaucaccc

SEQ ID NO: 38543 - RNA, 21 nt, Artificial Sequence
  GATA2 Guide RNA
ucaaacaucugcugggggcua

SEQ ID NO: 38544 - RNA, 21 nt, Artificial Sequence
  GATA2 Guide RNA
ucacagcuccccaccacaaaa

SEQ ID NO: 38545 - RNA, 21 nt, Artificial Sequence
  GATA2 Guide RNA
ucacccauccccagaucuggg

SEQ ID NO: 38546 - RNA, 21 nt, Artificial Sequence
  GATA2 Guide RNA
ucacugccugaccagaacaua

SEQ ID NO: 38547 - RNA, 21 nt, Artificial Sequence
  GATA2 Guide RNA
ucacuuaagauucagggaggg

SEQ ID NO: 38548 - RNA, 21 nt, Artificial Sequence
  GATA2 Guide RNA
ucaggcagugaccaacccugg

SEQ ID NO: 38549 - RNA, 21 nt, Artificial Sequence
  GATA2 Guide RNA
ucagggagaggagacucuaaa

SEQ ID NO: 38550 - RNA, 21 nt, Artificial Sequence
  GATA2 Guide RNA
ucagggagggaaagggggaau

SEQ ID NO: 38551 - RNA, 21 nt, Artificial Sequence
  GATA2 Guide RNA
ucaguuccuugccccaggguu

SEQ ID NO: 38552 - RNA, 21 nt, Artificial Sequence
  GATA2 Guide RNA
uccaguguacccccaaaguuc

SEQ ID NO: 38553 - RNA, 21 nt, Artificial Sequence
  GATA2 Guide RNA
ucccaagucacagcuccccac

SEQ ID NO: 38554 - RNA, 21 nt, Artificial Sequence
  GATA2 Guide RNA
ucccagaucuggggaugggug

SEQ ID NO: 38555 - RNA, 21 nt, Artificial Sequence
  GATA2 Guide RNA
uccccaccacaaaaacgcaaa

SEQ ID NO: 38556 - RNA, 21 nt, Artificial Sequence
  GATA2 Guide RNA
uccccagaucugggaaaccaa

SEQ ID NO: 38557 - RNA, 21 nt, Artificial Sequence
  GATA2 Guide RNA
ucccccuuucccucccugaau

SEQ ID NO: 38558 - RNA, 21 nt, Artificial Sequence
  GATA2 Guide RNA
uccccucuuccacgaaguccc

SEQ ID NO: 38559 - RNA, 21 nt, Artificial Sequence
  GATA2 Guide RNA
ucccucccugaaucuuaagug

SEQ ID NO: 38560 - RNA, 21 nt, Artificial Sequence
  GATA2 Guide RNA
ucccugacccgggggucucaa

SEQ ID NO: 38561 - RNA, 21 nt, Artificial Sequence
  GATA2 Guide RNA
uccucucccugacccgggggu

SEQ ID NO: 38562 - RNA, 21 nt, Artificial Sequence
  GATA2 Guide RNA
uccuguucuauguucugguca

SEQ ID NO: 38563 - RNA, 21 nt, Artificial Sequence
  GATA2 Guide RNA
uccuugccccaggguugguca

SEQ ID NO: 38564 - RNA, 21 nt, Artificial Sequence
  GATA2 Guide RNA
ucgcucuaauagcccccagca

SEQ ID NO: 38565 - RNA, 21 nt, Artificial Sequence
  GATA2 Guide RNA
ucguggaagaggggagcauuu

SEQ ID NO: 38566 - RNA, 21 nt, Artificial Sequence
  GATA2 Guide RNA
ucuaauagcccccagcagaug

SEQ ID NO: 38567 - RNA, 21 nt, Artificial Sequence
  GATA2 Guide RNA
ucuauguucuggucaggcagu

SEQ ID NO: 38568 - RNA, 21 nt, Artificial Sequence
  GATA2 Guide RNA
ucucaaacaucugcugggggc

SEQ ID NO: 38569 - RNA, 21 nt, Artificial Sequence
  GATA2 Guide RNA
ucucccaagucacagcucccc

SEQ ID NO: 38570 - RNA, 21 nt, Artificial Sequence
  GATA2 Guide RNA
ucucccugacccgggggucuc

SEQ ID NO: 38571 - RNA, 21 nt, Artificial Sequence
  GATA2 Guide RNA
ucuccucucccugacccgggg

SEQ ID NO: 38572 - RNA, 21 nt, Artificial Sequence
  GATA2 Guide RNA
ucucgcucuaauagcccccag

SEQ ID NO: 38573 - RNA, 21 nt, Artificial Sequence
  GATA2 Guide RNA
ucugcugggggcuauuagagc

SEQ ID NO: 38574 - RNA, 21 nt, Artificial Sequence
  GATA2 Guide RNA
ucugggaaaccaacacugcca

SEQ ID NO: 38575 - RNA, 21 nt, Artificial Sequence
  GATA2 Guide RNA
ucuggggaugggugaugucuc

SEQ ID NO: 38576 - RNA, 21 nt, Artificial Sequence
  GATA2 Guide RNA
ucuggucaggcagugaccaac

SEQ ID NO: 38577 - RNA, 21 nt, Artificial Sequence
  GATA2 Guide RNA
ucuuaagugcuuccaguguac

SEQ ID NO: 38578 - RNA, 21 nt, Artificial Sequence
  GATA2 Guide RNA
ucuuccacgaaguccccagca

SEQ ID NO: 38579 - RNA, 21 nt, Artificial Sequence
  GATA2 Guide RNA
ugaacuuuggggguacacugg

SEQ ID NO: 38580 - RNA, 21 nt, Artificial Sequence
  GATA2 Guide RNA
ugaccaacccuggggcaagga

SEQ ID NO: 38581 - RNA, 21 nt, Artificial Sequence
  GATA2 Guide RNA
ugaccagaacauagaacagga

SEQ ID NO: 38582 - RNA, 21 nt, Artificial Sequence
  GATA2 Guide RNA
ugacccgggggucucaaacau

SEQ ID NO: 38583 - RNA, 21 nt, Artificial Sequence
  GATA2 Guide RNA
ugacuugggagagguggcagu

SEQ ID NO: 38584 - RNA, 21 nt, Artificial Sequence
  GATA2 Guide RNA
ugagacccccgggucagggag

SEQ ID NO: 38585 - RNA, 21 nt, Artificial Sequence
  GATA2 Guide RNA
ugaugucucgcucuaauagcc

SEQ ID NO: 38586 - RNA, 21 nt, Artificial Sequence
  GATA2 Guide RNA
ugccaccucucccaagucaca

SEQ ID NO: 38587 - RNA, 21 nt, Artificial Sequence
  GATA2 Guide RNA
ugccauuuucuuaagugcuuc

SEQ ID NO: 38588 - RNA, 21 nt, Artificial Sequence
  GATA2 Guide RNA
ugccccaggguuggucacugc

SEQ ID NO: 38589 - RNA, 21 nt, Artificial Sequence
  GATA2 Guide RNA
ugccugaccagaacauagaac

SEQ ID NO: 38590 - RNA, 21 nt, Artificial Sequence
  GATA2 Guide RNA
ugcguuuuugugguggggagc

SEQ ID NO: 38591 - RNA, 21 nt, Artificial Sequence
  GATA2 Guide RNA
ugcuccccucuuccacgaagu

SEQ ID NO: 38592 - RNA, 21 nt, Artificial Sequence
  GATA2 Guide RNA
ugcuggggacuucguggaaga

SEQ ID NO: 38593 - RNA, 21 nt, Artificial Sequence
  GATA2 Guide RNA
ugcugggggcuauuagagcga

SEQ ID NO: 38594 - RNA, 21 nt, Artificial Sequence
  GATA2 Guide RNA
ugcuuccaguguacccccaaa

SEQ ID NO: 38595 - RNA, 21 nt, Artificial Sequence
  GATA2 Guide RNA
uggaagaggggagcauuugcg

SEQ ID NO: 38596 - RNA, 21 nt, Artificial Sequence
  GATA2 Guide RNA
uggaagcacuuaagaaaaugg

SEQ ID NO: 38597 - RNA, 21 nt, Artificial Sequence
  GATA2 Guide RNA
uggcaaaaguuuuagagucuc

SEQ ID NO: 38598 - RNA, 21 nt, Artificial Sequence
  GATA2 Guide RNA
uggcaguguugguuucccaga

SEQ ID NO: 38599 - RNA, 21 nt, Artificial Sequence
  GATA2 Guide RNA
ugggaaaccaacacugccacc

SEQ ID NO: 38600 - RNA, 21 nt, Artificial Sequence
  GATA2 Guide RNA
ugggagagguggcaguguugg

SEQ ID NO: 38601 - RNA, 21 nt, Artificial Sequence
  GATA2 Guide RNA
uggggacuucguggaagaggg

SEQ ID NO: 38602 - RNA, 21 nt, Artificial Sequence
  GATA2 Guide RNA
uggggagcugugacuugggag

SEQ ID NO: 38603 - RNA, 21 nt, Artificial Sequence
  GATA2 Guide RNA
uggggaugggugaugucucgc

SEQ ID NO: 38604 - RNA, 21 nt, Artificial Sequence
  GATA2 Guide RNA
uggggcaaggaacugaacuuu

SEQ ID NO: 38605 - RNA, 21 nt, Artificial Sequence
  GATA2 Guide RNA
ugggggcuauuagagcgagac

SEQ ID NO: 38606 - RNA, 21 nt, Artificial Sequence
  GATA2 Guide RNA
uggggguacacuggaagcacu

SEQ ID NO: 38607 - RNA, 21 nt, Artificial Sequence
  GATA2 Guide RNA
ugggugaugucucgcucuaau

SEQ ID NO: 38608 - RNA, 21 nt, Artificial Sequence
  GATA2 Guide RNA
uggucacugccugaccagaac

SEQ ID NO: 38609 - RNA, 21 nt, Artificial Sequence
  GATA2 Guide RNA
uggucaggcagugaccaaccc

SEQ ID NO: 38610 - RNA, 21 nt, Artificial Sequence
  GATA2 Guide RNA
ugguggggagcugugacuugg

SEQ ID NO: 38611 - RNA, 21 nt, Artificial Sequence
  GATA2 Guide RNA
ugguuucccagaucuggggau

SEQ ID NO: 38612 - RNA, 21 nt, Artificial Sequence
  GATA2 Guide RNA
uguacccccaaaguucaguuc

SEQ ID NO: 38613 - RNA, 21 nt, Artificial Sequence
  GATA2 Guide RNA
ugucucgcucuaauagccccc

SEQ ID NO: 38614 - RNA, 21 nt, Artificial Sequence
  GATA2 Guide RNA
ugugacuugggagagguggca

SEQ ID NO: 38615 - RNA, 21 nt, Artificial Sequence
  GATA2 Guide RNA
ugugguggggagcugugacuu

SEQ ID NO: 38616 - RNA, 21 nt, Artificial Sequence
  GATA2 Guide RNA
uguucuauguucuggucaggc

SEQ ID NO: 38617 - RNA, 21 nt, Artificial Sequence
  GATA2 Guide RNA
uguucuggucaggcagugacc

SEQ ID NO: 38618 - RNA, 21 nt, Artificial Sequence
  GATA2 Guide RNA
uguugguuucccagaucuggg

SEQ ID NO: 38619 - RNA, 21 nt, Artificial Sequence
  GATA2 Guide RNA
uguuugagacccccgggucag

SEQ ID NO: 38620 - RNA, 21 nt, Artificial Sequence
  GATA2 Guide RNA
uuaagauucagggagggaaag

SEQ ID NO: 38621 - RNA, 21 nt, Artificial Sequence
  GATA2 Guide RNA
uuaagugcuuccaguguaccc

SEQ ID NO: 38622 - RNA, 21 nt, Artificial Sequence
  GATA2 Guide RNA
uuagagcgagacaucacccau

SEQ ID NO: 38623 - RNA, 21 nt, Artificial Sequence
  GATA2 Guide RNA
uuagagucuccucucccugac

SEQ ID NO: 38624 - RNA, 21 nt, Artificial Sequence
  GATA2 Guide RNA
uucacuuaagauucagggagg

SEQ ID NO: 38625 - RNA, 21 nt, Artificial Sequence
  GATA2 Guide RNA
uucagggagggaaagggggaa

SEQ ID NO: 38626 - RNA, 21 nt, Artificial Sequence
  GATA2 Guide RNA
uucaguuccuugccccagggu

SEQ ID NO: 38627 - RNA, 21 nt, Artificial Sequence
  GATA2 Guide RNA
uuccacgaaguccccagcacc

SEQ ID NO: 38628 - RNA, 21 nt, Artificial Sequence
  GATA2 Guide RNA
uuccaguguacccccaaaguu

SEQ ID NO: 38629 - RNA, 21 nt, Artificial Sequence
  GATA2 Guide RNA
uucccagaucuggggaugggu

SEQ ID NO: 38630 - RNA, 21 nt, Artificial Sequence
  GATA2 Guide RNA
uucccccuuucccucccugaa

SEQ ID NO: 38631 - RNA, 21 nt, Artificial Sequence
  GATA2 Guide RNA
uucccucccugaaucuuaagu

SEQ ID NO: 38632 - RNA, 21 nt, Artificial Sequence
  GATA2 Guide RNA
uuccuguucuauguucugguc

SEQ ID NO: 38633 - RNA, 21 nt, Artificial Sequence
  GATA2 Guide RNA
uuccuugccccaggguugguc

SEQ ID NO: 38634 - RNA, 21 nt, Artificial Sequence
  GATA2 Guide RNA
uucguggaagaggggagcauu

SEQ ID NO: 38635 - RNA, 21 nt, Artificial Sequence
  GATA2 Guide RNA
uucuauguucuggucaggcag

SEQ ID NO: 38636 - RNA, 21 nt, Artificial Sequence
  GATA2 Guide RNA
uucuggucaggcagugaccaa

SEQ ID NO: 38637 - RNA, 21 nt, Artificial Sequence
  GATA2 Guide RNA
uucuuaagugcuuccagugua

SEQ ID NO: 38638 - RNA, 21 nt, Artificial Sequence
  GATA2 Guide RNA
uugagacccccgggucaggga

SEQ ID NO: 38639 - RNA, 21 nt, Artificial Sequence
  GATA2 Guide RNA
uugccauuuucuuaagugcuu

SEQ ID NO: 38640 - RNA, 21 nt, Artificial Sequence
  GATA2 Guide RNA
uugccccaggguuggucacug

SEQ ID NO: 38641 - RNA, 21 nt, Artificial Sequence
  GATA2 Guide RNA
uugcguuuuugugguggggag

SEQ ID NO: 38642 - RNA, 21 nt, Artificial Sequence
  GATA2 Guide RNA
uugggagagguggcaguguug

SEQ ID NO: 38643 - RNA, 21 nt, Artificial Sequence
  GATA2 Guide RNA
uuggggguacacuggaagcac

SEQ ID NO: 38644 - RNA, 21 nt, Artificial Sequence
  GATA2 Guide RNA
uuggucacugccugaccagaa

SEQ ID NO: 38645 - RNA, 21 nt, Artificial Sequence
  GATA2 Guide RNA
uugguuucccagaucugggga

SEQ ID NO: 38646 - RNA, 21 nt, Artificial Sequence
  GATA2 Guide RNA
uugugguggggagcugugacu

SEQ ID NO: 38647 - RNA, 21 nt, Artificial Sequence
  GATA2 Guide RNA
uuuagagucuccucucccuga

SEQ ID NO: 38648 - RNA, 21 nt, Artificial Sequence
  GATA2 Guide RNA
uuucacuuaagauucagggag

SEQ ID NO: 38649 - RNA, 21 nt, Artificial Sequence
  GATA2 Guide RNA
uuucccagaucuggggauggg

SEQ ID NO: 38650 - RNA, 21 nt, Artificial Sequence
  GATA2 Guide RNA
uuucccucccugaaucuuaag

SEQ ID NO: 38651 - RNA, 21 nt, Artificial Sequence
  GATA2 Guide RNA
uuucuuaagugcuuccagugu

SEQ ID NO: 38652 - RNA, 21 nt, Artificial Sequence
  GATA2 Guide RNA
uuugagacccccgggucaggg

SEQ ID NO: 38653 - RNA, 21 nt, Artificial Sequence
  GATA2 Guide RNA
uuugccauuuucuuaagugcu

SEQ ID NO: 38654 - RNA, 21 nt, Artificial Sequence
  GATA2 Guide RNA
uuugcguuuuuguggugggga

SEQ ID NO: 38655 - RNA, 21 nt, Artificial Sequence
  GATA2 Guide RNA
uuuggggguacacuggaagca

SEQ ID NO: 38656 - RNA, 21 nt, Artificial Sequence
  GATA2 Guide RNA
uuugugguggggagcugugac

SEQ ID NO: 38657 - RNA, 21 nt, Artificial Sequence
  GATA2 Guide RNA
uuuuagagucuccucucccug

SEQ ID NO: 38658 - RNA, 21 nt, Artificial Sequence
  GATA2 Guide RNA
uuuucacuuaagauucaggga

SEQ ID NO: 38659 - RNA, 21 nt, Artificial Sequence
  GATA2 Guide RNA
uuuucuuaagugcuuccagug

SEQ ID NO: 38660 - RNA, 21 nt, Artificial Sequence
  GATA2 Guide RNA
uuuugccauuuucuuaagugc

SEQ ID NO: 38661 - RNA, 21 nt, Artificial Sequence
  GATA2 Guide RNA
uuuugugguggggagcuguga

SEQ ID NO: 38662 - RNA, 21 nt, Artificial Sequence
  GATA2 Guide RNA
uuuuugugguggggagcugug

SEQ ID NO: 38663 - RNA, 22 nt, Artificial Sequence
  GATA2 Guide RNA
aaaaacgcaaaugcuccccucu

SEQ ID NO: 38664 - RNA, 22 nt, Artificial Sequence
  GATA2 Guide RNA
aaaacgcaaaugcuccccucuu

SEQ ID NO: 38665 - RNA, 22 nt, Artificial Sequence
  GATA2 Guide RNA
aaaaguuuuagagucuccucuc

SEQ ID NO: 38666 - RNA, 22 nt, Artificial Sequence
  GATA2 Guide RNA
aaacaucugcugggggcuauua

SEQ ID NO: 38667 - RNA, 22 nt, Artificial Sequence
  GATA2 Guide RNA
aaaccaacacugccaccucucc

SEQ ID NO: 38668 - RNA, 22 nt, Artificial Sequence
  GATA2 Guide RNA
aaacgcaaaugcuccccucuuc

SEQ ID NO: 38669 - RNA, 22 nt, Artificial Sequence
  GATA2 Guide RNA
aaagggggaauuccuguucuau

SEQ ID NO: 38670 - RNA, 22 nt, Artificial Sequence
  GATA2 Guide RNA
aaaguucaguuccuugccccag

SEQ ID NO: 38671 - RNA, 22 nt, Artificial Sequence
  GATA2 Guide RNA
aaaguuuuagagucuccucucc

SEQ ID NO: 38672 - RNA, 22 nt, Artificial Sequence
  GATA2 Guide RNA
aaaugcuccccucuuccacgaa

SEQ ID NO: 38673 - RNA, 22 nt, Artificial Sequence
  GATA2 Guide RNA
aaauggcaaaaguuuuagaguc

SEQ ID NO: 38674 - RNA, 22 nt, Artificial Sequence
  GATA2 Guide RNA
aacacugccaccucucccaagu

SEQ ID NO: 38675 - RNA, 22 nt, Artificial Sequence
  GATA2 Guide RNA
aacaggaauucccccuuucccu

SEQ ID NO: 38676 - RNA, 22 nt, Artificial Sequence
  GATA2 Guide RNA
aacauagaacaggaauuccccc

SEQ ID NO: 38677 - RNA, 22 nt, Artificial Sequence
  GATA2 Guide RNA
aacaucugcugggggcuauuag

SEQ ID NO: 38678 - RNA, 22 nt, Artificial Sequence
  GATA2 Guide RNA
aaccaacacugccaccucuccc

SEQ ID NO: 38679 - RNA, 22 nt, Artificial Sequence
  GATA2 Guide RNA
aacccuggggcaaggaacugaa

SEQ ID NO: 38680 - RNA, 22 nt, Artificial Sequence
  GATA2 Guide RNA
aacgcaaaugcuccccucuucc

SEQ ID NO: 38681 - RNA, 22 nt, Artificial Sequence
  GATA2 Guide RNA
aacugaacuuuggggguacacu

SEQ ID NO: 38682 - RNA, 22 nt, Artificial Sequence
  GATA2 Guide RNA
aacuuuggggguacacuggaag

SEQ ID NO: 38683 - RNA, 22 nt, Artificial Sequence
  GATA2 Guide RNA
aagaggggagcauuugcguuuu

SEQ ID NO: 38684 - RNA, 22 nt, Artificial Sequence
  GATA2 Guide RNA
aagauucagggagggaaagggg

SEQ ID NO: 38685 - RNA, 22 nt, Artificial Sequence
  GATA2 Guide RNA
aagcacuuaagaaaauggcaaa

SEQ ID NO: 38686 - RNA, 22 nt, Artificial Sequence
  GATA2 Guide RNA
aaggaacugaacuuugggggua

SEQ ID NO: 38687 - RNA, 22 nt, Artificial Sequence
  GATA2 Guide RNA
aagggggaauuccuguucuaug

SEQ ID NO: 38688 - RNA, 22 nt, Artificial Sequence
  GATA2 Guide RNA
aagucacagcuccccaccacaa

SEQ ID NO: 38689 - RNA, 22 nt, Artificial Sequence
  GATA2 Guide RNA
aagugcuuccaguguaccccca

SEQ ID NO: 38690 - RNA, 22 nt, Artificial Sequence
  GATA2 Guide RNA
aaguucaguuccuugccccagg

SEQ ID NO: 38691 - RNA, 22 nt, Artificial Sequence
  GATA2 Guide RNA
aaguuuuagagucuccucuccc

SEQ ID NO: 38692 - RNA, 22 nt, Artificial Sequence
  GATA2 Guide RNA
aauagcccccagcagauguuug

SEQ ID NO: 38693 - RNA, 22 nt, Artificial Sequence
  GATA2 Guide RNA
aaugcuccccucuuccacgaag

SEQ ID NO: 38694 - RNA, 22 nt, Artificial Sequence
  GATA2 Guide RNA
aauggcaaaaguuuuagagucu

SEQ ID NO: 38695 - RNA, 22 nt, Artificial Sequence
  GATA2 Guide RNA
aauucccccuuucccucccuga

SEQ ID NO: 38696 - RNA, 22 nt, Artificial Sequence
  GATA2 Guide RNA
aauuccuguucuauguucuggu

SEQ ID NO: 38697 - RNA, 22 nt, Artificial Sequence
  GATA2 Guide RNA
acaaaaacgcaaaugcuccccu

SEQ ID NO: 38698 - RNA, 22 nt, Artificial Sequence
  GATA2 Guide RNA
acacugccaccucucccaaguc

SEQ ID NO: 38699 - RNA, 22 nt, Artificial Sequence
  GATA2 Guide RNA
acacuggaagcacuuaagaaaa

SEQ ID NO: 38700 - RNA, 22 nt, Artificial Sequence
  GATA2 Guide RNA
acagcuccccaccacaaaaacg

SEQ ID NO: 38701 - RNA, 22 nt, Artificial Sequence
  GATA2 Guide RNA
acaggaauucccccuuucccuc

SEQ ID NO: 38702 - RNA, 22 nt, Artificial Sequence
  GATA2 Guide RNA
acauagaacaggaauucccccu

SEQ ID NO: 38703 - RNA, 22 nt, Artificial Sequence
  GATA2 Guide RNA
acaucacccauccccagaucug

SEQ ID NO: 38704 - RNA, 22 nt, Artificial Sequence
  GATA2 Guide RNA
acaucugcugggggcuauuaga

SEQ ID NO: 38705 - RNA, 22 nt, Artificial Sequence
  GATA2 Guide RNA
accaacacugccaccucuccca

SEQ ID NO: 38706 - RNA, 22 nt, Artificial Sequence
  GATA2 Guide RNA
accaacccuggggcaaggaacu

SEQ ID NO: 38707 - RNA, 22 nt, Artificial Sequence
  GATA2 Guide RNA
accacaaaaacgcaaaugcucc

SEQ ID NO: 38708 - RNA, 22 nt, Artificial Sequence
  GATA2 Guide RNA
accagaacauagaacaggaauu

SEQ ID NO: 38709 - RNA, 22 nt, Artificial Sequence
  GATA2 Guide RNA
acccauccccagaucugggaaa

SEQ ID NO: 38710 - RNA, 22 nt, Artificial Sequence
  GATA2 Guide RNA
acccccaaaguucaguuccuug

SEQ ID NO: 38711 - RNA, 22 nt, Artificial Sequence
  GATA2 Guide RNA
acccccgggucagggagaggag

SEQ ID NO: 38712 - RNA, 22 nt, Artificial Sequence
  GATA2 Guide RNA
acccgggggucucaaacaucug

SEQ ID NO: 38713 - RNA, 22 nt, Artificial Sequence
  GATA2 Guide RNA
acccuggggcaaggaacugaac

SEQ ID NO: 38714 - RNA, 22 nt, Artificial Sequence
  GATA2 Guide RNA
accucucccaagucacagcucc

SEQ ID NO: 38715 - RNA, 22 nt, Artificial Sequence
  GATA2 Guide RNA
acgcaaaugcuccccucuucca

SEQ ID NO: 38716 - RNA, 22 nt, Artificial Sequence
  GATA2 Guide RNA
acugaacuuuggggguacacug

SEQ ID NO: 38717 - RNA, 22 nt, Artificial Sequence
  GATA2 Guide RNA
acugccaccucucccaagucac

SEQ ID NO: 38718 - RNA, 22 nt, Artificial Sequence
  GATA2 Guide RNA
acugccugaccagaacauagaa

SEQ ID NO: 38719 - RNA, 22 nt, Artificial Sequence
  GATA2 Guide RNA
acuggaagcacuuaagaaaaug

SEQ ID NO: 38720 - RNA, 22 nt, Artificial Sequence
  GATA2 Guide RNA
acuuaagauucagggagggaaa

SEQ ID NO: 38721 - RNA, 22 nt, Artificial Sequence
  GATA2 Guide RNA
acuucguggaagaggggagcau

SEQ ID NO: 38722 - RNA, 22 nt, Artificial Sequence
  GATA2 Guide RNA
acuugggagagguggcaguguu

SEQ ID NO: 38723 - RNA, 22 nt, Artificial Sequence
  GATA2 Guide RNA
acuuuggggguacacuggaagc

SEQ ID NO: 38724 - RNA, 22 nt, Artificial Sequence
  GATA2 Guide RNA
acuuuugccauuuucuuaagug

SEQ ID NO: 38725 - RNA, 22 nt, Artificial Sequence
  GATA2 Guide RNA
agaacaggaauucccccuuucc

SEQ ID NO: 38726 - RNA, 22 nt, Artificial Sequence
  GATA2 Guide RNA
agaacauagaacaggaauuccc

SEQ ID NO: 38727 - RNA, 22 nt, Artificial Sequence
  GATA2 Guide RNA
agacaucacccauccccagauc

SEQ ID NO: 38728 - RNA, 22 nt, Artificial Sequence
  GATA2 Guide RNA
agacccccgggucagggagagg

SEQ ID NO: 38729 - RNA, 22 nt, Artificial Sequence
  GATA2 Guide RNA
agacucuaaaacuuuugccauu

SEQ ID NO: 38730 - RNA, 22 nt, Artificial Sequence
  GATA2 Guide RNA
agagcgagacaucacccauccc

SEQ ID NO: 38731 - RNA, 22 nt, Artificial Sequence
  GATA2 Guide RNA
agaggagacucuaaaacuuuug

SEQ ID NO: 38732 - RNA, 22 nt, Artificial Sequence
  GATA2 Guide RNA
agaggggagcauuugcguuuuu

SEQ ID NO: 38733 - RNA, 22 nt, Artificial Sequence
  GATA2 Guide RNA
agagguggcaguguugguuucc

SEQ ID NO: 38734 - RNA, 22 nt, Artificial Sequence
  GATA2 Guide RNA
agagucuccucucccugacccg

SEQ ID NO: 38735 - RNA, 22 nt, Artificial Sequence
  GATA2 Guide RNA
agaucugggaaaccaacacugc

SEQ ID NO: 38736 - RNA, 22 nt, Artificial Sequence
  GATA2 Guide RNA
agaucuggggaugggugauguc

SEQ ID NO: 38737 - RNA, 22 nt, Artificial Sequence
  GATA2 Guide RNA
agauguuugagacccccggguc

SEQ ID NO: 38738 - RNA, 22 nt, Artificial Sequence
  GATA2 Guide RNA
agauucagggagggaaaggggg

SEQ ID NO: 38739 - RNA, 22 nt, Artificial Sequence
  GATA2 Guide RNA
agcacuuaagaaaauggcaaaa

SEQ ID NO: 38740 - RNA, 22 nt, Artificial Sequence
  GATA2 Guide RNA
agcagauguuugagacccccgg

SEQ ID NO: 38741 - RNA, 22 nt, Artificial Sequence
  GATA2 Guide RNA
agcauuugcguuuuuguggugg

SEQ ID NO: 38742 - RNA, 22 nt, Artificial Sequence
  GATA2 Guide RNA
agcccccagcagauguuugaga

SEQ ID NO: 38743 - RNA, 22 nt, Artificial Sequence
  GATA2 Guide RNA
agcgagacaucacccaucccca

SEQ ID NO: 38744 - RNA, 22 nt, Artificial Sequence
  GATA2 Guide RNA
agcuccccaccacaaaaacgca

SEQ ID NO: 38745 - RNA, 22 nt, Artificial Sequence
  GATA2 Guide RNA
agcugugacuugggagaggugg

SEQ ID NO: 38746 - RNA, 22 nt, Artificial Sequence
  GATA2 Guide RNA
aggaacugaacuuuggggguac

SEQ ID NO: 38747 - RNA, 22 nt, Artificial Sequence
  GATA2 Guide RNA
aggaauucccccuuucccuccc

SEQ ID NO: 38748 - RNA, 22 nt, Artificial Sequence
  GATA2 Guide RNA
aggagacucuaaaacuuuugcc

SEQ ID NO: 38749 - RNA, 22 nt, Artificial Sequence
  GATA2 Guide RNA
aggcagugaccaacccuggggc

SEQ ID NO: 38750 - RNA, 22 nt, Artificial Sequence
  GATA2 Guide RNA
agggaaagggggaauuccuguu

SEQ ID NO: 38751 - RNA, 22 nt, Artificial Sequence
  GATA2 Guide RNA
agggagaggagacucuaaaacu

SEQ ID NO: 38752 - RNA, 22 nt, Artificial Sequence
  GATA2 Guide RNA
agggagggaaagggggaauucc

SEQ ID NO: 38753 - RNA, 22 nt, Artificial Sequence
  GATA2 Guide RNA
aggggagcauuugcguuuuugu

SEQ ID NO: 38754 - RNA, 22 nt, Artificial Sequence
  GATA2 Guide RNA
agggggaauuccuguucuaugu

SEQ ID NO: 38755 - RNA, 22 nt, Artificial Sequence
  GATA2 Guide RNA
aggguuggucacugccugacca

SEQ ID NO: 38756 - RNA, 22 nt, Artificial Sequence
  GATA2 Guide RNA
aggugcuggggacuucguggaa

SEQ ID NO: 38757 - RNA, 22 nt, Artificial Sequence
  GATA2 Guide RNA
agguggcaguguugguuuccca

SEQ ID NO: 38758 - RNA, 22 nt, Artificial Sequence
  GATA2 Guide RNA
agucacagcuccccaccacaaa

SEQ ID NO: 38759 - RNA, 22 nt, Artificial Sequence
  GATA2 Guide RNA
agucuccucucccugacccggg

SEQ ID NO: 38760 - RNA, 22 nt, Artificial Sequence
  GATA2 Guide RNA
agugaccaacccuggggcaagg

SEQ ID NO: 38761 - RNA, 22 nt, Artificial Sequence
  GATA2 Guide RNA
agugcuuccaguguacccccaa

SEQ ID NO: 38762 - RNA, 22 nt, Artificial Sequence
  GATA2 Guide RNA
aguguacccccaaaguucaguu

SEQ ID NO: 38763 - RNA, 22 nt, Artificial Sequence
  GATA2 Guide RNA
aguguugguuucccagaucugg

SEQ ID NO: 38764 - RNA, 22 nt, Artificial Sequence
  GATA2 Guide RNA
aguucaguuccuugccccaggg

SEQ ID NO: 38765 - RNA, 22 nt, Artificial Sequence
  GATA2 Guide RNA
aguuccuugccccaggguuggu

SEQ ID NO: 38766 - RNA, 22 nt, Artificial Sequence
  GATA2 Guide RNA
aguuuuagagucuccucucccu

SEQ ID NO: 38767 - RNA, 22 nt, Artificial Sequence
  GATA2 Guide RNA
auagaacaggaauucccccuuu

SEQ ID NO: 38768 - RNA, 22 nt, Artificial Sequence
  GATA2 Guide RNA
auagcccccagcagauguuuga

SEQ ID NO: 38769 - RNA, 22 nt, Artificial Sequence
  GATA2 Guide RNA
aucacccauccccagaucuggg

SEQ ID NO: 38770 - RNA, 22 nt, Artificial Sequence
  GATA2 Guide RNA
auccccagaucugggaaaccaa

SEQ ID NO: 38771 - RNA, 22 nt, Artificial Sequence
  GATA2 Guide RNA
aucugcugggggcuauuagagc

SEQ ID NO: 38772 - RNA, 22 nt, Artificial Sequence
  GATA2 Guide RNA
aucugggaaaccaacacugcca

SEQ ID NO: 38773 - RNA, 22 nt, Artificial Sequence
  GATA2 Guide RNA
aucuggggaugggugaugucuc

SEQ ID NO: 38774 - RNA, 22 nt, Artificial Sequence
  GATA2 Guide RNA
augcuccccucuuccacgaagu

SEQ ID NO: 38775 - RNA, 22 nt, Artificial Sequence
  GATA2 Guide RNA
auggcaaaaguuuuagagucuc

SEQ ID NO: 38776 - RNA, 22 nt, Artificial Sequence
  GATA2 Guide RNA
augggugaugucucgcucuaau

SEQ ID NO: 38777 - RNA, 22 nt, Artificial Sequence
  GATA2 Guide RNA
augucucgcucuaauagccccc

SEQ ID NO: 38778 - RNA, 22 nt, Artificial Sequence
  GATA2 Guide RNA
auguucuggucaggcagugacc

SEQ ID NO: 38779 - RNA, 22 nt, Artificial Sequence
  GATA2 Guide RNA
auguuugagacccccgggucag

SEQ ID NO: 38780 - RNA, 22 nt, Artificial Sequence
  GATA2 Guide RNA
auuagagcgagacaucacccau

SEQ ID NO: 38781 - RNA, 22 nt, Artificial Sequence
  GATA2 Guide RNA
auucagggagggaaagggggaa

SEQ ID NO: 38782 - RNA, 22 nt, Artificial Sequence
  GATA2 Guide RNA
auucccccuuucccucccugaa

SEQ ID NO: 38783 - RNA, 22 nt, Artificial Sequence
  GATA2 Guide RNA
auuccuguucuauguucugguc

SEQ ID NO: 38784 - RNA, 22 nt, Artificial Sequence
  GATA2 Guide RNA
auuugcguuuuuguggugggga

SEQ ID NO: 38785 - RNA, 22 nt, Artificial Sequence
  GATA2 Guide RNA
auuuucuuaagugcuuccagug

SEQ ID NO: 38786 - RNA, 22 nt, Artificial Sequence
  GATA2 Guide RNA
caaaaacgcaaaugcuccccuc

SEQ ID NO: 38787 - RNA, 22 nt, Artificial Sequence
  GATA2 Guide RNA
caaaaguuuuagagucuccucu

SEQ ID NO: 38788 - RNA, 22 nt, Artificial Sequence
  GATA2 Guide RNA
caaacaucugcugggggcuauu

SEQ ID NO: 38789 - RNA, 22 nt, Artificial Sequence
  GATA2 Guide RNA
caaaguucaguuccuugcccca

SEQ ID NO: 38790 - RNA, 22 nt, Artificial Sequence
  GATA2 Guide RNA
caaaugcuccccucuuccacga

SEQ ID NO: 38791 - RNA, 22 nt, Artificial Sequence
  GATA2 Guide RNA
caacacugccaccucucccaag

SEQ ID NO: 38792 - RNA, 22 nt, Artificial Sequence
  GATA2 Guide RNA
caacccuggggcaaggaacuga

SEQ ID NO: 38793 - RNA, 22 nt, Artificial Sequence
  GATA2 Guide RNA
caaggaacugaacuuugggggu

SEQ ID NO: 38794 - RNA, 22 nt, Artificial Sequence
  GATA2 Guide RNA
caagucacagcuccccaccaca

SEQ ID NO: 38795 - RNA, 22 nt, Artificial Sequence
  GATA2 Guide RNA
cacaaaaacgcaaaugcucccc

SEQ ID NO: 38796 - RNA, 22 nt, Artificial Sequence
  GATA2 Guide RNA
cacagcuccccaccacaaaaac

SEQ ID NO: 38797 - RNA, 22 nt, Artificial Sequence
  GATA2 Guide RNA
caccacaaaaacgcaaaugcuc

SEQ ID NO: 38798 - RNA, 22 nt, Artificial Sequence
  GATA2 Guide RNA
cacccauccccagaucugggaa

SEQ ID NO: 38799 - RNA, 22 nt, Artificial Sequence
  GATA2 Guide RNA
caccucucccaagucacagcuc

SEQ ID NO: 38800 - RNA, 22 nt, Artificial Sequence
  GATA2 Guide RNA
cacugccaccucucccaaguca

SEQ ID NO: 38801 - RNA, 22 nt, Artificial Sequence
  GATA2 Guide RNA
cacugccugaccagaacauaga

SEQ ID NO: 38802 - RNA, 22 nt, Artificial Sequence
  GATA2 Guide RNA
cacuggaagcacuuaagaaaau

SEQ ID NO: 38803 - RNA, 22 nt, Artificial Sequence
  GATA2 Guide RNA
cacuuaagaaaauggcaaaagu

SEQ ID NO: 38804 - RNA, 22 nt, Artificial Sequence
  GATA2 Guide RNA
cacuuaagauucagggagggaa

SEQ ID NO: 38805 - RNA, 22 nt, Artificial Sequence
  GATA2 Guide RNA
cagaacauagaacaggaauucc

SEQ ID NO: 38806 - RNA, 22 nt, Artificial Sequence
  GATA2 Guide RNA
cagaucugggaaaccaacacug

SEQ ID NO: 38807 - RNA, 22 nt, Artificial Sequence
  GATA2 Guide RNA
cagaucuggggaugggugaugu

SEQ ID NO: 38808 - RNA, 22 nt, Artificial Sequence
  GATA2 Guide RNA
cagauguuugagacccccgggu

SEQ ID NO: 38809 - RNA, 22 nt, Artificial Sequence
  GATA2 Guide RNA
cagcagauguuugagacccccg

SEQ ID NO: 38810 - RNA, 22 nt, Artificial Sequence
  GATA2 Guide RNA
cagcuccccaccacaaaaacgc

SEQ ID NO: 38811 - RNA, 22 nt, Artificial Sequence
  GATA2 Guide RNA
caggaauucccccuuucccucc

SEQ ID NO: 38812 - RNA, 22 nt, Artificial Sequence
  GATA2 Guide RNA
caggcagugaccaacccugggg

SEQ ID NO: 38813 - RNA, 22 nt, Artificial Sequence
  GATA2 Guide RNA
cagggagaggagacucuaaaac

SEQ ID NO: 38814 - RNA, 22 nt, Artificial Sequence
  GATA2 Guide RNA
cagggagggaaagggggaauuc

SEQ ID NO: 38815 - RNA, 22 nt, Artificial Sequence
  GATA2 Guide RNA
caggguuggucacugccugacc

SEQ ID NO: 38816 - RNA, 22 nt, Artificial Sequence
  GATA2 Guide RNA
caggugcuggggacuucgugga

SEQ ID NO: 38817 - RNA, 22 nt, Artificial Sequence
  GATA2 Guide RNA
cagugaccaacccuggggcaag

SEQ ID NO: 38818 - RNA, 22 nt, Artificial Sequence
  GATA2 Guide RNA
caguguacccccaaaguucagu

SEQ ID NO: 38819 - RNA, 22 nt, Artificial Sequence
  GATA2 Guide RNA
caguguugguuucccagaucug

SEQ ID NO: 38820 - RNA, 22 nt, Artificial Sequence
  GATA2 Guide RNA
caguuccuugccccaggguugg

SEQ ID NO: 38821 - RNA, 22 nt, Artificial Sequence
  GATA2 Guide RNA
cauagaacaggaauucccccuu

SEQ ID NO: 38822 - RNA, 22 nt, Artificial Sequence
  GATA2 Guide RNA
caucacccauccccagaucugg

SEQ ID NO: 38823 - RNA, 22 nt, Artificial Sequence
  GATA2 Guide RNA
cauccccagaucugggaaacca

SEQ ID NO: 38824 - RNA, 22 nt, Artificial Sequence
  GATA2 Guide RNA
caucugcugggggcuauuagag

SEQ ID NO: 38825 - RNA, 22 nt, Artificial Sequence
  GATA2 Guide RNA
cauuugcguuuuuguggugggg

SEQ ID NO: 38826 - RNA, 22 nt, Artificial Sequence
  GATA2 Guide RNA
cauuuucuuaagugcuuccagu

SEQ ID NO: 38827 - RNA, 22 nt, Artificial Sequence
  GATA2 Guide RNA
ccaaaguucaguuccuugcccc

SEQ ID NO: 38828 - RNA, 22 nt, Artificial Sequence
  GATA2 Guide RNA
ccaacacugccaccucucccaa

SEQ ID NO: 38829 - RNA, 22 nt, Artificial Sequence
  GATA2 Guide RNA
ccaacccuggggcaaggaacug

SEQ ID NO: 38830 - RNA, 22 nt, Artificial Sequence
  GATA2 Guide RNA
ccaagucacagcuccccaccac

SEQ ID NO: 38831 - RNA, 22 nt, Artificial Sequence
  GATA2 Guide RNA
ccacaaaaacgcaaaugcuccc

SEQ ID NO: 38832 - RNA, 22 nt, Artificial Sequence
  GATA2 Guide RNA
ccaccacaaaaacgcaaaugcu

SEQ ID NO: 38833 - RNA, 22 nt, Artificial Sequence
  GATA2 Guide RNA
ccaccucucccaagucacagcu

SEQ ID NO: 38834 - RNA, 22 nt, Artificial Sequence
  GATA2 Guide RNA
ccagaacauagaacaggaauuc

SEQ ID NO: 38835 - RNA, 22 nt, Artificial Sequence
  GATA2 Guide RNA
ccagaucugggaaaccaacacu

SEQ ID NO: 38836 - RNA, 22 nt, Artificial Sequence
  GATA2 Guide RNA
ccagaucuggggaugggugaug

SEQ ID NO: 38837 - RNA, 22 nt, Artificial Sequence
  GATA2 Guide RNA
ccagcagauguuugagaccccc

SEQ ID NO: 38838 - RNA, 22 nt, Artificial Sequence
  GATA2 Guide RNA
ccaggguuggucacugccugac

SEQ ID NO: 38839 - RNA, 22 nt, Artificial Sequence
  GATA2 Guide RNA
ccaguguacccccaaaguucag

SEQ ID NO: 38840 - RNA, 22 nt, Artificial Sequence
  GATA2 Guide RNA
ccauccccagaucugggaaacc

SEQ ID NO: 38841 - RNA, 22 nt, Artificial Sequence
  GATA2 Guide RNA
ccauuuucuuaagugcuuccag

SEQ ID NO: 38842 - RNA, 22 nt, Artificial Sequence
  GATA2 Guide RNA
cccaaaguucaguuccuugccc

SEQ ID NO: 38843 - RNA, 22 nt, Artificial Sequence
  GATA2 Guide RNA
cccaagucacagcuccccacca

SEQ ID NO: 38844 - RNA, 22 nt, Artificial Sequence
  GATA2 Guide RNA
cccaccacaaaaacgcaaaugc

SEQ ID NO: 38845 - RNA, 22 nt, Artificial Sequence
  GATA2 Guide RNA
cccagaucugggaaaccaacac

SEQ ID NO: 38846 - RNA, 22 nt, Artificial Sequence
  GATA2 Guide RNA
cccagaucuggggaugggugau

SEQ ID NO: 38847 - RNA, 22 nt, Artificial Sequence
  GATA2 Guide RNA
cccagcagauguuugagacccc

SEQ ID NO: 38848 - RNA, 22 nt, Artificial Sequence
  GATA2 Guide RNA
cccaggguuggucacugccuga

SEQ ID NO: 38849 - RNA, 22 nt, Artificial Sequence
  GATA2 Guide RNA
cccauccccagaucugggaaac

SEQ ID NO: 38850 - RNA, 22 nt, Artificial Sequence
  GATA2 Guide RNA
ccccaaaguucaguuccuugcc

SEQ ID NO: 38851 - RNA, 22 nt, Artificial Sequence
  GATA2 Guide RNA
ccccaccacaaaaacgcaaaug

SEQ ID NO: 38852 - RNA, 22 nt, Artificial Sequence
  GATA2 Guide RNA
ccccagaucugggaaaccaaca

SEQ ID NO: 38853 - RNA, 22 nt, Artificial Sequence
  GATA2 Guide RNA
ccccagcagauguuugagaccc

SEQ ID NO: 38854 - RNA, 22 nt, Artificial Sequence
  GATA2 Guide RNA
ccccaggguuggucacugccug

SEQ ID NO: 38855 - RNA, 22 nt, Artificial Sequence
  GATA2 Guide RNA
cccccaaaguucaguuccuugc

SEQ ID NO: 38856 - RNA, 22 nt, Artificial Sequence
  GATA2 Guide RNA
cccccagcagauguuugagacc

SEQ ID NO: 38857 - RNA, 22 nt, Artificial Sequence
  GATA2 Guide RNA
cccccgggucagggagaggaga

SEQ ID NO: 38858 - RNA, 22 nt, Artificial Sequence
  GATA2 Guide RNA
cccccuuucccucccugaaucu

SEQ ID NO: 38859 - RNA, 22 nt, Artificial Sequence
  GATA2 Guide RNA
ccccgggucagggagaggagac

SEQ ID NO: 38860 - RNA, 22 nt, Artificial Sequence
  GATA2 Guide RNA
ccccucuuccacgaagucccca

SEQ ID NO: 38861 - RNA, 22 nt, Artificial Sequence
  GATA2 Guide RNA
ccccuuucccucccugaaucuu

SEQ ID NO: 38862 - RNA, 22 nt, Artificial Sequence
  GATA2 Guide RNA
cccgggggucucaaacaucugc

SEQ ID NO: 38863 - RNA, 22 nt, Artificial Sequence
  GATA2 Guide RNA
cccgggucagggagaggagacu

SEQ ID NO: 38864 - RNA, 22 nt, Artificial Sequence
  GATA2 Guide RNA
cccucuuccacgaaguccccag

SEQ ID NO: 38865 - RNA, 22 nt, Artificial Sequence
  GATA2 Guide RNA
cccugacccgggggucucaaac

SEQ ID NO: 38866 - RNA, 22 nt, Artificial Sequence
  GATA2 Guide RNA
cccuggggcaaggaacugaacu

SEQ ID NO: 38867 - RNA, 22 nt, Artificial Sequence
  GATA2 Guide RNA
cccuuucccucccugaaucuua

SEQ ID NO: 38868 - RNA, 22 nt, Artificial Sequence
  GATA2 Guide RNA
ccgggggucucaaacaucugcu

SEQ ID NO: 38869 - RNA, 22 nt, Artificial Sequence
  GATA2 Guide RNA
ccgggucagggagaggagacuc

SEQ ID NO: 38870 - RNA, 22 nt, Artificial Sequence
  GATA2 Guide RNA
ccucucccaagucacagcuccc

SEQ ID NO: 38871 - RNA, 22 nt, Artificial Sequence
  GATA2 Guide RNA
ccucucccugacccgggggucu

SEQ ID NO: 38872 - RNA, 22 nt, Artificial Sequence
  GATA2 Guide RNA
ccucuuccacgaaguccccagc

SEQ ID NO: 38873 - RNA, 22 nt, Artificial Sequence
  GATA2 Guide RNA
ccugaccagaacauagaacagg

SEQ ID NO: 38874 - RNA, 22 nt, Artificial Sequence
  GATA2 Guide RNA
ccugacccgggggucucaaaca

SEQ ID NO: 38875 - RNA, 22 nt, Artificial Sequence
  GATA2 Guide RNA
ccuggggcaaggaacugaacuu

SEQ ID NO: 38876 - RNA, 22 nt, Artificial Sequence
  GATA2 Guide RNA
ccuguucuauguucuggucagg

SEQ ID NO: 38877 - RNA, 22 nt, Artificial Sequence
  GATA2 Guide RNA
ccuugccccaggguuggucacu

SEQ ID NO: 38878 - RNA, 22 nt, Artificial Sequence
  GATA2 Guide RNA
ccuuucccucccugaaucuuaa

SEQ ID NO: 38879 - RNA, 22 nt, Artificial Sequence
  GATA2 Guide RNA
cgagacaucacccauccccaga

SEQ ID NO: 38880 - RNA, 22 nt, Artificial Sequence
  GATA2 Guide RNA
cgcaaaugcuccccucuuccac

SEQ ID NO: 38881 - RNA, 22 nt, Artificial Sequence
  GATA2 Guide RNA
cgcucuaauagcccccagcaga

SEQ ID NO: 38882 - RNA, 22 nt, Artificial Sequence
  GATA2 Guide RNA
cgggggucucaaacaucugcug

SEQ ID NO: 38883 - RNA, 22 nt, Artificial Sequence
  GATA2 Guide RNA
cgggucagggagaggagacucu

SEQ ID NO: 38884 - RNA, 22 nt, Artificial Sequence
  GATA2 Guide RNA
cguggaagaggggagcauuugc

SEQ ID NO: 38885 - RNA, 22 nt, Artificial Sequence
  GATA2 Guide RNA
cguuuuugugguggggagcugu

SEQ ID NO: 38886 - RNA, 22 nt, Artificial Sequence
  GATA2 Guide RNA
cuaauagcccccagcagauguu

SEQ ID NO: 38887 - RNA, 22 nt, Artificial Sequence
  GATA2 Guide RNA
cuauguucuggucaggcaguga

SEQ ID NO: 38888 - RNA, 22 nt, Artificial Sequence
  GATA2 Guide RNA
cuauuagagcgagacaucaccc

SEQ ID NO: 38889 - RNA, 22 nt, Artificial Sequence
  GATA2 Guide RNA
cucaaacaucugcugggggcua

SEQ ID NO: 38890 - RNA, 22 nt, Artificial Sequence
  GATA2 Guide RNA
cucccaagucacagcuccccac

SEQ ID NO: 38891 - RNA, 22 nt, Artificial Sequence
  GATA2 Guide RNA
cuccccaccacaaaaacgcaaa

SEQ ID NO: 38892 - RNA, 22 nt, Artificial Sequence
  GATA2 Guide RNA
cuccccucuuccacgaaguccc

SEQ ID NO: 38893 - RNA, 22 nt, Artificial Sequence
  GATA2 Guide RNA
cucccugacccgggggucucaa

SEQ ID NO: 38894 - RNA, 22 nt, Artificial Sequence
  GATA2 Guide RNA
cuccucucccugacccgggggu

SEQ ID NO: 38895 - RNA, 22 nt, Artificial Sequence
  GATA2 Guide RNA
cucgcucuaauagcccccagca

SEQ ID NO: 38896 - RNA, 22 nt, Artificial Sequence
  GATA2 Guide RNA
cucuaaaacuuuugccauuuuc

SEQ ID NO: 38897 - RNA, 22 nt, Artificial Sequence
  GATA2 Guide RNA
cucuaauagcccccagcagaug

SEQ ID NO: 38898 - RNA, 22 nt, Artificial Sequence
  GATA2 Guide RNA
cucucccaagucacagcucccc

SEQ ID NO: 38899 - RNA, 22 nt, Artificial Sequence
  GATA2 Guide RNA
cucucccugacccgggggucuc

SEQ ID NO: 38900 - RNA, 22 nt, Artificial Sequence
  GATA2 Guide RNA
cucuuccacgaaguccccagca

SEQ ID NO: 38901 - RNA, 22 nt, Artificial Sequence
  GATA2 Guide RNA
cugaacuuuggggguacacugg

SEQ ID NO: 38902 - RNA, 22 nt, Artificial Sequence
  GATA2 Guide RNA
cugaccagaacauagaacagga

SEQ ID NO: 38903 - RNA, 22 nt, Artificial Sequence
  GATA2 Guide RNA
cugacccgggggucucaaacau

SEQ ID NO: 38904 - RNA, 22 nt, Artificial Sequence
  GATA2 Guide RNA
cugccaccucucccaagucaca

SEQ ID NO: 38905 - RNA, 22 nt, Artificial Sequence
  GATA2 Guide RNA
cugccugaccagaacauagaac

SEQ ID NO: 38906 - RNA, 22 nt, Artificial Sequence
  GATA2 Guide RNA
cugcugggggcuauuagagcga

SEQ ID NO: 38907 - RNA, 22 nt, Artificial Sequence
  GATA2 Guide RNA
cuggaagcacuuaagaaaaugg

SEQ ID NO: 38908 - RNA, 22 nt, Artificial Sequence
  GATA2 Guide RNA
cugggaaaccaacacugccacc

SEQ ID NO: 38909 - RNA, 22 nt, Artificial Sequence
  GATA2 Guide RNA
cuggggacuucguggaagaggg

SEQ ID NO: 38910 - RNA, 22 nt, Artificial Sequence
  GATA2 Guide RNA
cuggggaugggugaugucucgc

SEQ ID NO: 38911 - RNA, 22 nt, Artificial Sequence
  GATA2 Guide RNA
cuggggcaaggaacugaacuuu

SEQ ID NO: 38912 - RNA, 22 nt, Artificial Sequence
  GATA2 Guide RNA
cugggggcuauuagagcgagac

SEQ ID NO: 38913 - RNA, 22 nt, Artificial Sequence
  GATA2 Guide RNA
cuggucaggcagugaccaaccc

SEQ ID NO: 38914 - RNA, 22 nt, Artificial Sequence
  GATA2 Guide RNA
cugugacuugggagagguggca

SEQ ID NO: 38915 - RNA, 22 nt, Artificial Sequence
  GATA2 Guide RNA
cuguucuauguucuggucaggc

SEQ ID NO: 38916 - RNA, 22 nt, Artificial Sequence
  GATA2 Guide RNA
cuuaagauucagggagggaaag

SEQ ID NO: 38917 - RNA, 22 nt, Artificial Sequence
  GATA2 Guide RNA
cuuaagugcuuccaguguaccc

SEQ ID NO: 38918 - RNA, 22 nt, Artificial Sequence
  GATA2 Guide RNA
cuuccacgaaguccccagcacc

SEQ ID NO: 38919 - RNA, 22 nt, Artificial Sequence
  GATA2 Guide RNA
cuuccaguguacccccaaaguu

SEQ ID NO: 38920 - RNA, 22 nt, Artificial Sequence
  GATA2 Guide RNA
cuucguggaagaggggagcauu

SEQ ID NO: 38921 - RNA, 22 nt, Artificial Sequence
  GATA2 Guide RNA
cuugccccaggguuggucacug

SEQ ID NO: 38922 - RNA, 22 nt, Artificial Sequence
  GATA2 Guide RNA
cuugggagagguggcaguguug

SEQ ID NO: 38923 - RNA, 22 nt, Artificial Sequence
  GATA2 Guide RNA
cuuucccucccugaaucuuaag

SEQ ID NO: 38924 - RNA, 22 nt, Artificial Sequence
  GATA2 Guide RNA
cuuuggggguacacuggaagca

SEQ ID NO: 38925 - RNA, 22 nt, Artificial Sequence
  GATA2 Guide RNA
cuuuugccauuuucuuaagugc

SEQ ID NO: 38926 - RNA, 22 nt, Artificial Sequence
  GATA2 Guide RNA
gaaaauggcaaaaguuuuagag

SEQ ID NO: 38927 - RNA, 22 nt, Artificial Sequence
  GATA2 Guide RNA
gaaaccaacacugccaccucuc

SEQ ID NO: 38928 - RNA, 22 nt, Artificial Sequence
  GATA2 Guide RNA
gaaagggggaauuccuguucua

SEQ ID NO: 38929 - RNA, 22 nt, Artificial Sequence
  GATA2 Guide RNA
gaacaggaauucccccuuuccc

SEQ ID NO: 38930 - RNA, 22 nt, Artificial Sequence
  GATA2 Guide RNA
gaacauagaacaggaauucccc

SEQ ID NO: 38931 - RNA, 22 nt, Artificial Sequence
  GATA2 Guide RNA
gaacugaacuuuggggguacac

SEQ ID NO: 38932 - RNA, 22 nt, Artificial Sequence
  GATA2 Guide RNA
gaacuuuggggguacacuggaa

SEQ ID NO: 38933 - RNA, 22 nt, Artificial Sequence
  GATA2 Guide RNA
gaagaggggagcauuugcguuu

SEQ ID NO: 38934 - RNA, 22 nt, Artificial Sequence
  GATA2 Guide RNA
gaagcacuuaagaaaauggcaa

SEQ ID NO: 38935 - RNA, 22 nt, Artificial Sequence
  GATA2 Guide RNA
gaauucccccuuucccucccug

SEQ ID NO: 38936 - RNA, 22 nt, Artificial Sequence
  GATA2 Guide RNA
gaauuccuguucuauguucugg

SEQ ID NO: 38937 - RNA, 22 nt, Artificial Sequence
  GATA2 Guide RNA
gacaucacccauccccagaucu

SEQ ID NO: 38938 - RNA, 22 nt, Artificial Sequence
  GATA2 Guide RNA
gaccaacccuggggcaaggaac

SEQ ID NO: 38939 - RNA, 22 nt, Artificial Sequence
  GATA2 Guide RNA
gaccagaacauagaacaggaau

SEQ ID NO: 38940 - RNA, 22 nt, Artificial Sequence
  GATA2 Guide RNA
gacccccgggucagggagagga

SEQ ID NO: 38941 - RNA, 22 nt, Artificial Sequence
  GATA2 Guide RNA
gacccgggggucucaaacaucu

SEQ ID NO: 38942 - RNA, 22 nt, Artificial Sequence
  GATA2 Guide RNA
gacucuaaaacuuuugccauuu

SEQ ID NO: 38943 - RNA, 22 nt, Artificial Sequence
  GATA2 Guide RNA
gacuucguggaagaggggagca

SEQ ID NO: 38944 - RNA, 22 nt, Artificial Sequence
  GATA2 Guide RNA
gacuugggagagguggcagugu

SEQ ID NO: 38945 - RNA, 22 nt, Artificial Sequence
  GATA2 Guide RNA
gagacaucacccauccccagau

SEQ ID NO: 38946 - RNA, 22 nt, Artificial Sequence
  GATA2 Guide RNA
gagacccccgggucagggagag

SEQ ID NO: 38947 - RNA, 22 nt, Artificial Sequence
  GATA2 Guide RNA
gagacucuaaaacuuuugccau

SEQ ID NO: 38948 - RNA, 22 nt, Artificial Sequence
  GATA2 Guide RNA
gagaggagacucuaaaacuuuu

SEQ ID NO: 38949 - RNA, 22 nt, Artificial Sequence
  GATA2 Guide RNA
gagagguggcaguguugguuuc

SEQ ID NO: 38950 - RNA, 22 nt, Artificial Sequence
  GATA2 Guide RNA
gagcauuugcguuuuuguggug

SEQ ID NO: 38951 - RNA, 22 nt, Artificial Sequence
  GATA2 Guide RNA
gagcgagacaucacccaucccc

SEQ ID NO: 38952 - RNA, 22 nt, Artificial Sequence
  GATA2 Guide RNA
gagcugugacuugggagaggug

SEQ ID NO: 38953 - RNA, 22 nt, Artificial Sequence
  GATA2 Guide RNA
gaggagacucuaaaacuuuugc

SEQ ID NO: 38954 - RNA, 22 nt, Artificial Sequence
  GATA2 Guide RNA
gagggaaagggggaauuccugu

SEQ ID NO: 38955 - RNA, 22 nt, Artificial Sequence
  GATA2 Guide RNA
gaggggagcauuugcguuuuug

SEQ ID NO: 38956 - RNA, 22 nt, Artificial Sequence
  GATA2 Guide RNA
gagguggcaguguugguuuccc

SEQ ID NO: 38957 - RNA, 22 nt, Artificial Sequence
  GATA2 Guide RNA
gagucuccucucccugacccgg

SEQ ID NO: 38958 - RNA, 22 nt, Artificial Sequence
  GATA2 Guide RNA
gaucugggaaaccaacacugcc

SEQ ID NO: 38959 - RNA, 22 nt, Artificial Sequence
  GATA2 Guide RNA
gaucuggggaugggugaugucu

SEQ ID NO: 38960 - RNA, 22 nt, Artificial Sequence
  GATA2 Guide RNA
gaugggugaugucucgcucuaa

SEQ ID NO: 38961 - RNA, 22 nt, Artificial Sequence
  GATA2 Guide RNA
gaugucucgcucuaauagcccc

SEQ ID NO: 38962 - RNA, 22 nt, Artificial Sequence
  GATA2 Guide RNA
gauguuugagacccccggguca

SEQ ID NO: 38963 - RNA, 22 nt, Artificial Sequence
  GATA2 Guide RNA
gauucagggagggaaaggggga

SEQ ID NO: 38964 - RNA, 22 nt, Artificial Sequence
  GATA2 Guide RNA
gcaaaaguuuuagagucuccuc

SEQ ID NO: 38965 - RNA, 22 nt, Artificial Sequence
  GATA2 Guide RNA
gcaaaugcuccccucuuccacg

SEQ ID NO: 38966 - RNA, 22 nt, Artificial Sequence
  GATA2 Guide RNA
gcaaggaacugaacuuuggggg

SEQ ID NO: 38967 - RNA, 22 nt, Artificial Sequence
  GATA2 Guide RNA
gcacuuaagaaaauggcaaaag

SEQ ID NO: 38968 - RNA, 22 nt, Artificial Sequence
  GATA2 Guide RNA
gcagauguuugagacccccggg

SEQ ID NO: 38969 - RNA, 22 nt, Artificial Sequence
  GATA2 Guide RNA
gcaggugcuggggacuucgugg

SEQ ID NO: 38970 - RNA, 22 nt, Artificial Sequence
  GATA2 Guide RNA
gcagugaccaacccuggggcaa

SEQ ID NO: 38971 - RNA, 22 nt, Artificial Sequence
  GATA2 Guide RNA
gcaguguugguuucccagaucu

SEQ ID NO: 38972 - RNA, 22 nt, Artificial Sequence
  GATA2 Guide RNA
gcauuugcguuuuugugguggg

SEQ ID NO: 38973 - RNA, 22 nt, Artificial Sequence
  GATA2 Guide RNA
gccaccucucccaagucacagc

SEQ ID NO: 38974 - RNA, 22 nt, Artificial Sequence
  GATA2 Guide RNA
gccauuuucuuaagugcuucca

SEQ ID NO: 38975 - RNA, 22 nt, Artificial Sequence
  GATA2 Guide RNA
gccccaggguuggucacugccu

SEQ ID NO: 38976 - RNA, 22 nt, Artificial Sequence
  GATA2 Guide RNA
gcccccagcagauguuugagac

SEQ ID NO: 38977 - RNA, 22 nt, Artificial Sequence
  GATA2 Guide RNA
gccugaccagaacauagaacag

SEQ ID NO: 38978 - RNA, 22 nt, Artificial Sequence
  GATA2 Guide RNA
gcgagacaucacccauccccag

SEQ ID NO: 38979 - RNA, 22 nt, Artificial Sequence
  GATA2 Guide RNA
gcguuuuugugguggggagcug

SEQ ID NO: 38980 - RNA, 22 nt, Artificial Sequence
  GATA2 Guide RNA
gcuauuagagcgagacaucacc

SEQ ID NO: 38981 - RNA, 22 nt, Artificial Sequence
  GATA2 Guide RNA
gcuccccaccacaaaaacgcaa

SEQ ID NO: 38982 - RNA, 22 nt, Artificial Sequence
  GATA2 Guide RNA
gcuccccucuuccacgaagucc

SEQ ID NO: 38983 - RNA, 22 nt, Artificial Sequence
  GATA2 Guide RNA
gcucuaauagcccccagcagau

SEQ ID NO: 38984 - RNA, 22 nt, Artificial Sequence
  GATA2 Guide RNA
gcuggggacuucguggaagagg

SEQ ID NO: 38985 - RNA, 22 nt, Artificial Sequence
  GATA2 Guide RNA
gcugggggcuauuagagcgaga

SEQ ID NO: 38986 - RNA, 22 nt, Artificial Sequence
  GATA2 Guide RNA
gcugugacuugggagagguggc

SEQ ID NO: 38987 - RNA, 22 nt, Artificial Sequence
  GATA2 Guide RNA
gcuuccaguguacccccaaagu

SEQ ID NO: 38988 - RNA, 22 nt, Artificial Sequence
  GATA2 Guide RNA
ggaaaccaacacugccaccucu

SEQ ID NO: 38989 - RNA, 22 nt, Artificial Sequence
  GATA2 Guide RNA
ggaaagggggaauuccuguucu

SEQ ID NO: 38990 - RNA, 22 nt, Artificial Sequence
  GATA2 Guide RNA
ggaacugaacuuuggggguaca

SEQ ID NO: 38991 - RNA, 22 nt, Artificial Sequence
  GATA2 Guide RNA
ggaagaggggagcauuugcguu

SEQ ID NO: 38992 - RNA, 22 nt, Artificial Sequence
  GATA2 Guide RNA
ggaagcacuuaagaaaauggca

SEQ ID NO: 38993 - RNA, 22 nt, Artificial Sequence
  GATA2 Guide RNA
ggaauucccccuuucccucccu

SEQ ID NO: 38994 - RNA, 22 nt, Artificial Sequence
  GATA2 Guide RNA
ggaauuccuguucuauguucug

SEQ ID NO: 38995 - RNA, 22 nt, Artificial Sequence
  GATA2 Guide RNA
ggacuucguggaagaggggagc

SEQ ID NO: 38996 - RNA, 22 nt, Artificial Sequence
  GATA2 Guide RNA
ggagacucuaaaacuuuugcca

SEQ ID NO: 38997 - RNA, 22 nt, Artificial Sequence
  GATA2 Guide RNA
ggagaggagacucuaaaacuuu

SEQ ID NO: 38998 - RNA, 22 nt, Artificial Sequence
  GATA2 Guide RNA
ggagagguggcaguguugguuu

SEQ ID NO: 38999 - RNA, 22 nt, Artificial Sequence
  GATA2 Guide RNA
ggagcauuugcguuuuuguggu

SEQ ID NO: 39000 - RNA, 22 nt, Artificial Sequence
  GATA2 Guide RNA
ggagcugugacuugggagaggu

SEQ ID NO: 39001 - RNA, 22 nt, Artificial Sequence
  GATA2 Guide RNA
ggagggaaagggggaauuccug

SEQ ID NO: 39002 - RNA, 22 nt, Artificial Sequence
  GATA2 Guide RNA
ggaugggugaugucucgcucua

SEQ ID NO: 39003 - RNA, 22 nt, Artificial Sequence
  GATA2 Guide RNA
ggcaaaaguuuuagagucuccu

SEQ ID NO: 39004 - RNA, 22 nt, Artificial Sequence
  GATA2 Guide RNA
ggcaaggaacugaacuuugggg

SEQ ID NO: 39005 - RNA, 22 nt, Artificial Sequence
  GATA2 Guide RNA
ggcaggugcuggggacuucgug

SEQ ID NO: 39006 - RNA, 22 nt, Artificial Sequence
  GATA2 Guide RNA
ggcagugaccaacccuggggca

SEQ ID NO: 39007 - RNA, 22 nt, Artificial Sequence
  GATA2 Guide RNA
ggcaguguugguuucccagauc

SEQ ID NO: 39008 - RNA, 22 nt, Artificial Sequence
  GATA2 Guide RNA
ggcuauuagagcgagacaucac

SEQ ID NO: 39009 - RNA, 22 nt, Artificial Sequence
  GATA2 Guide RNA
gggaaaccaacacugccaccuc

SEQ ID NO: 39010 - RNA, 22 nt, Artificial Sequence
  GATA2 Guide RNA
gggaaagggggaauuccuguuc

SEQ ID NO: 39011 - RNA, 22 nt, Artificial Sequence
  GATA2 Guide RNA
gggaauuccuguucuauguucu

SEQ ID NO: 39012 - RNA, 22 nt, Artificial Sequence
  GATA2 Guide RNA
gggacuucguggaagaggggag

SEQ ID NO: 39013 - RNA, 22 nt, Artificial Sequence
  GATA2 Guide RNA
gggagaggagacucuaaaacuu

SEQ ID NO: 39014 - RNA, 22 nt, Artificial Sequence
  GATA2 Guide RNA
gggagagguggcaguguugguu

SEQ ID NO: 39015 - RNA, 22 nt, Artificial Sequence
  GATA2 Guide RNA
gggagcauuugcguuuuugugg

SEQ ID NO: 39016 - RNA, 22 nt, Artificial Sequence
  GATA2 Guide RNA
gggagcugugacuugggagagg

SEQ ID NO: 39017 - RNA, 22 nt, Artificial Sequence
  GATA2 Guide RNA
gggagggaaagggggaauuccu

SEQ ID NO: 39018 - RNA, 22 nt, Artificial Sequence
  GATA2 Guide RNA
gggaugggugaugucucgcucu

SEQ ID NO: 39019 - RNA, 22 nt, Artificial Sequence
  GATA2 Guide RNA
gggcaaggaacugaacuuuggg

SEQ ID NO: 39020 - RNA, 22 nt, Artificial Sequence
  GATA2 Guide RNA
gggcuauuagagcgagacauca

SEQ ID NO: 39021 - RNA, 22 nt, Artificial Sequence
  GATA2 Guide RNA
ggggaauuccuguucuauguuc

SEQ ID NO: 39022 - RNA, 22 nt, Artificial Sequence
  GATA2 Guide RNA
ggggacuucguggaagagggga

SEQ ID NO: 39023 - RNA, 22 nt, Artificial Sequence
  GATA2 Guide RNA
ggggagcauuugcguuuuugug

SEQ ID NO: 39024 - RNA, 22 nt, Artificial Sequence
  GATA2 Guide RNA
ggggagcugugacuugggagag

SEQ ID NO: 39025 - RNA, 22 nt, Artificial Sequence
  GATA2 Guide RNA
ggggaugggugaugucucgcuc

SEQ ID NO: 39026 - RNA, 22 nt, Artificial Sequence
  GATA2 Guide RNA
ggggcaaggaacugaacuuugg

SEQ ID NO: 39027 - RNA, 22 nt, Artificial Sequence
  GATA2 Guide RNA
ggggcuauuagagcgagacauc

SEQ ID NO: 39028 - RNA, 22 nt, Artificial Sequence
  GATA2 Guide RNA
gggggaauuccuguucuauguu

SEQ ID NO: 39029 - RNA, 22 nt, Artificial Sequence
  GATA2 Guide RNA
gggggcuauuagagcgagacau

SEQ ID NO: 39030 - RNA, 22 nt, Artificial Sequence
  GATA2 Guide RNA
ggggguacacuggaagcacuua

SEQ ID NO: 39031 - RNA, 22 nt, Artificial Sequence
  GATA2 Guide RNA
gggggucucaaacaucugcugg

SEQ ID NO: 39032 - RNA, 22 nt, Artificial Sequence
  GATA2 Guide RNA
gggguacacuggaagcacuuaa

SEQ ID NO: 39033 - RNA, 22 nt, Artificial Sequence
  GATA2 Guide RNA
ggggucucaaacaucugcuggg

SEQ ID NO: 39034 - RNA, 22 nt, Artificial Sequence
  GATA2 Guide RNA
ggguacacuggaagcacuuaag

SEQ ID NO: 39035 - RNA, 22 nt, Artificial Sequence
  GATA2 Guide RNA
gggucagggagaggagacucua

SEQ ID NO: 39036 - RNA, 22 nt, Artificial Sequence
  GATA2 Guide RNA
gggucucaaacaucugcugggg

SEQ ID NO: 39037 - RNA, 22 nt, Artificial Sequence
  GATA2 Guide RNA
gggugaugucucgcucuaauag

SEQ ID NO: 39038 - RNA, 22 nt, Artificial Sequence
  GATA2 Guide RNA
ggguuggucacugccugaccag

SEQ ID NO: 39039 - RNA, 22 nt, Artificial Sequence
  GATA2 Guide RNA
gguacacuggaagcacuuaaga

SEQ ID NO: 39040 - RNA, 22 nt, Artificial Sequence
  GATA2 Guide RNA
ggucacugccugaccagaacau

SEQ ID NO: 39041 - RNA, 22 nt, Artificial Sequence
  GATA2 Guide RNA
ggucaggcagugaccaacccug

SEQ ID NO: 39042 - RNA, 22 nt, Artificial Sequence
  GATA2 Guide RNA
ggucagggagaggagacucuaa

SEQ ID NO: 39043 - RNA, 22 nt, Artificial Sequence
  GATA2 Guide RNA
ggucucaaacaucugcuggggg

SEQ ID NO: 39044 - RNA, 22 nt, Artificial Sequence
  GATA2 Guide RNA
ggugaugucucgcucuaauagc

SEQ ID NO: 39045 - RNA, 22 nt, Artificial Sequence
  GATA2 Guide RNA
ggugcuggggacuucguggaag

SEQ ID NO: 39046 - RNA, 22 nt, Artificial Sequence
  GATA2 Guide RNA
gguggcaguguugguuucccag

SEQ ID NO: 39047 - RNA, 22 nt, Artificial Sequence
  GATA2 Guide RNA
gguggggagcugugacuuggga

SEQ ID NO: 39048 - RNA, 22 nt, Artificial Sequence
  GATA2 Guide RNA
gguuggucacugccugaccaga

SEQ ID NO: 39049 - RNA, 22 nt, Artificial Sequence
  GATA2 Guide RNA
gguuucccagaucuggggaugg

SEQ ID NO: 39050 - RNA, 22 nt, Artificial Sequence
  GATA2 Guide RNA
guacacuggaagcacuuaagaa

SEQ ID NO: 39051 - RNA, 22 nt, Artificial Sequence
  GATA2 Guide RNA
guacccccaaaguucaguuccu

SEQ ID NO: 39052 - RNA, 22 nt, Artificial Sequence
  GATA2 Guide RNA
gucacagcuccccaccacaaaa

SEQ ID NO: 39053 - RNA, 22 nt, Artificial Sequence
  GATA2 Guide RNA
gucacugccugaccagaacaua

SEQ ID NO: 39054 - RNA, 22 nt, Artificial Sequence
  GATA2 Guide RNA
gucaggcagugaccaacccugg

SEQ ID NO: 39055 - RNA, 22 nt, Artificial Sequence
  GATA2 Guide RNA
gucagggagaggagacucuaaa

SEQ ID NO: 39056 - RNA, 22 nt, Artificial Sequence
  GATA2 Guide RNA
gucucaaacaucugcugggggc

SEQ ID NO: 39057 - RNA, 22 nt, Artificial Sequence
  GATA2 Guide RNA
gucuccucucccugacccgggg

SEQ ID NO: 39058 - RNA, 22 nt, Artificial Sequence
  GATA2 Guide RNA
gucucgcucuaauagcccccag

SEQ ID NO: 39059 - RNA, 22 nt, Artificial Sequence
  GATA2 Guide RNA
gugaccaacccuggggcaagga

SEQ ID NO: 39060 - RNA, 22 nt, Artificial Sequence
  GATA2 Guide RNA
gugacuugggagagguggcagu

SEQ ID NO: 39061 - RNA, 22 nt, Artificial Sequence
  GATA2 Guide RNA
gugaugucucgcucuaauagcc

SEQ ID NO: 39062 - RNA, 22 nt, Artificial Sequence
  GATA2 Guide RNA
gugcuggggacuucguggaaga

SEQ ID NO: 39063 - RNA, 22 nt, Artificial Sequence
  GATA2 Guide RNA
gugcuuccaguguacccccaaa

SEQ ID NO: 39064 - RNA, 22 nt, Artificial Sequence
  GATA2 Guide RNA
guggaagaggggagcauuugcg

SEQ ID NO: 39065 - RNA, 22 nt, Artificial Sequence
  GATA2 Guide RNA
guggcaguguugguuucccaga

SEQ ID NO: 39066 - RNA, 22 nt, Artificial Sequence
  GATA2 Guide RNA
guggggagcugugacuugggag

SEQ ID NO: 39067 - RNA, 22 nt, Artificial Sequence
  GATA2 Guide RNA
gugguggggagcugugacuugg

SEQ ID NO: 39068 - RNA, 22 nt, Artificial Sequence
  GATA2 Guide RNA
guguacccccaaaguucaguuc

SEQ ID NO: 39069 - RNA, 22 nt, Artificial Sequence
  GATA2 Guide RNA
guguugguuucccagaucuggg

SEQ ID NO: 39070 - RNA, 22 nt, Artificial Sequence
  GATA2 Guide RNA
guucaguuccuugccccagggu

SEQ ID NO: 39071 - RNA, 22 nt, Artificial Sequence
  GATA2 Guide RNA
guuccuugccccaggguugguc

SEQ ID NO: 39072 - RNA, 22 nt, Artificial Sequence
  GATA2 Guide RNA
guucuauguucuggucaggcag

SEQ ID NO: 39073 - RNA, 22 nt, Artificial Sequence
  GATA2 Guide RNA
guucuggucaggcagugaccaa

SEQ ID NO: 39074 - RNA, 22 nt, Artificial Sequence
  GATA2 Guide RNA
guuggucacugccugaccagaa

SEQ ID NO: 39075 - RNA, 22 nt, Artificial Sequence
  GATA2 Guide RNA
guugguuucccagaucugggga

SEQ ID NO: 39076 - RNA, 22 nt, Artificial Sequence
  GATA2 Guide RNA
guuucccagaucuggggauggg

SEQ ID NO: 39077 - RNA, 22 nt, Artificial Sequence
  GATA2 Guide RNA
guuugagacccccgggucaggg

SEQ ID NO: 39078 - RNA, 22 nt, Artificial Sequence
  GATA2 Guide RNA
guuuuagagucuccucucccug

SEQ ID NO: 39079 - RNA, 22 nt, Artificial Sequence
  GATA2 Guide RNA
guuuuugugguggggagcugug

SEQ ID NO: 39080 - RNA, 22 nt, Artificial Sequence
  GATA2 Guide RNA
uaagauucagggagggaaaggg

SEQ ID NO: 39081 - RNA, 22 nt, Artificial Sequence
  GATA2 Guide RNA
uaagugcuuccaguguaccccc

SEQ ID NO: 39082 - RNA, 22 nt, Artificial Sequence
  GATA2 Guide RNA
uaauagcccccagcagauguuu

SEQ ID NO: 39083 - RNA, 22 nt, Artificial Sequence
  GATA2 Guide RNA
uacacuggaagcacuuaagaaa

SEQ ID NO: 39084 - RNA, 22 nt, Artificial Sequence
  GATA2 Guide RNA
uacccccaaaguucaguuccuu

SEQ ID NO: 39085 - RNA, 22 nt, Artificial Sequence
  GATA2 Guide RNA
uagaacaggaauucccccuuuc

SEQ ID NO: 39086 - RNA, 22 nt, Artificial Sequence
  GATA2 Guide RNA
uagagcgagacaucacccaucc

SEQ ID NO: 39087 - RNA, 22 nt, Artificial Sequence
  GATA2 Guide RNA
uagagucuccucucccugaccc

SEQ ID NO: 39088 - RNA, 22 nt, Artificial Sequence
  GATA2 Guide RNA
uagcccccagcagauguuugag

SEQ ID NO: 39089 - RNA, 22 nt, Artificial Sequence
  GATA2 Guide RNA
uauguucuggucaggcagugac

SEQ ID NO: 39090 - RNA, 22 nt, Artificial Sequence
  GATA2 Guide RNA
uauuagagcgagacaucaccca

SEQ ID NO: 39091 - RNA, 22 nt, Artificial Sequence
  GATA2 Guide RNA
ucaaacaucugcugggggcuau

SEQ ID NO: 39092 - RNA, 22 nt, Artificial Sequence
  GATA2 Guide RNA
ucacagcuccccaccacaaaaa

SEQ ID NO: 39093 - RNA, 22 nt, Artificial Sequence
  GATA2 Guide RNA
ucacccauccccagaucuggga

SEQ ID NO: 39094 - RNA, 22 nt, Artificial Sequence
  GATA2 Guide RNA
ucacugccugaccagaacauag

SEQ ID NO: 39095 - RNA, 22 nt, Artificial Sequence
  GATA2 Guide RNA
ucacuuaagauucagggaggga

SEQ ID NO: 39096 - RNA, 22 nt, Artificial Sequence
  GATA2 Guide RNA
ucaggcagugaccaacccuggg

SEQ ID NO: 39097 - RNA, 22 nt, Artificial Sequence
  GATA2 Guide RNA
ucagggagaggagacucuaaaa

SEQ ID NO: 39098 - RNA, 22 nt, Artificial Sequence
  GATA2 Guide RNA
ucagggagggaaagggggaauu

SEQ ID NO: 39099 - RNA, 22 nt, Artificial Sequence
  GATA2 Guide RNA
ucaguuccuugccccaggguug

SEQ ID NO: 39100 - RNA, 22 nt, Artificial Sequence
  GATA2 Guide RNA
uccaguguacccccaaaguuca

SEQ ID NO: 39101 - RNA, 22 nt, Artificial Sequence
  GATA2 Guide RNA
ucccaagucacagcuccccacc

SEQ ID NO: 39102 - RNA, 22 nt, Artificial Sequence
  GATA2 Guide RNA
ucccagaucuggggauggguga

SEQ ID NO: 39103 - RNA, 22 nt, Artificial Sequence
  GATA2 Guide RNA
uccccaccacaaaaacgcaaau

SEQ ID NO: 39104 - RNA, 22 nt, Artificial Sequence
  GATA2 Guide RNA
uccccagaucugggaaaccaac

SEQ ID NO: 39105 - RNA, 22 nt, Artificial Sequence
  GATA2 Guide RNA
ucccccuuucccucccugaauc

SEQ ID NO: 39106 - RNA, 22 nt, Artificial Sequence
  GATA2 Guide RNA
uccccucuuccacgaagucccc

SEQ ID NO: 39107 - RNA, 22 nt, Artificial Sequence
  GATA2 Guide RNA
ucccugacccgggggucucaaa

SEQ ID NO: 39108 - RNA, 22 nt, Artificial Sequence
  GATA2 Guide RNA
uccucucccugacccggggguc

SEQ ID NO: 39109 - RNA, 22 nt, Artificial Sequence
  GATA2 Guide RNA
uccuguucuauguucuggucag

SEQ ID NO: 39110 - RNA, 22 nt, Artificial Sequence
  GATA2 Guide RNA
uccuugccccaggguuggucac

SEQ ID NO: 39111 - RNA, 22 nt, Artificial Sequence
  GATA2 Guide RNA
ucgcucuaauagcccccagcag

SEQ ID NO: 39112 - RNA, 22 nt, Artificial Sequence
  GATA2 Guide RNA
ucguggaagaggggagcauuug

SEQ ID NO: 39113 - RNA, 22 nt, Artificial Sequence
  GATA2 Guide RNA
ucuaauagcccccagcagaugu

SEQ ID NO: 39114 - RNA, 22 nt, Artificial Sequence
  GATA2 Guide RNA
ucuauguucuggucaggcagug

SEQ ID NO: 39115 - RNA, 22 nt, Artificial Sequence
  GATA2 Guide RNA
ucucaaacaucugcugggggcu

SEQ ID NO: 39116 - RNA, 22 nt, Artificial Sequence
  GATA2 Guide RNA
ucucccaagucacagcucccca

SEQ ID NO: 39117 - RNA, 22 nt, Artificial Sequence
  GATA2 Guide RNA
ucucccugacccgggggucuca

SEQ ID NO: 39118 - RNA, 22 nt, Artificial Sequence
  GATA2 Guide RNA
ucuccucucccugacccggggg

SEQ ID NO: 39119 - RNA, 22 nt, Artificial Sequence
  GATA2 Guide RNA
ucucgcucuaauagcccccagc

SEQ ID NO: 39120 - RNA, 22 nt, Artificial Sequence
  GATA2 Guide RNA
ucugcugggggcuauuagagcg

SEQ ID NO: 39121 - RNA, 22 nt, Artificial Sequence
  GATA2 Guide RNA
ucugggaaaccaacacugccac

SEQ ID NO: 39122 - RNA, 22 nt, Artificial Sequence
  GATA2 Guide RNA
ucuggggaugggugaugucucg

SEQ ID NO: 39123 - RNA, 22 nt, Artificial Sequence
  GATA2 Guide RNA
ucuggucaggcagugaccaacc

SEQ ID NO: 39124 - RNA, 22 nt, Artificial Sequence
  GATA2 Guide RNA
ucuuaagugcuuccaguguacc

SEQ ID NO: 39125 - RNA, 22 nt, Artificial Sequence
  GATA2 Guide RNA
ucuuccacgaaguccccagcac

SEQ ID NO: 39126 - RNA, 22 nt, Artificial Sequence
  GATA2 Guide RNA
ugaacuuuggggguacacugga

SEQ ID NO: 39127 - RNA, 22 nt, Artificial Sequence
  GATA2 Guide RNA
ugaccaacccuggggcaaggaa

SEQ ID NO: 39128 - RNA, 22 nt, Artificial Sequence
  GATA2 Guide RNA
ugaccagaacauagaacaggaa

SEQ ID NO: 39129 - RNA, 22 nt, Artificial Sequence
  GATA2 Guide RNA
ugacccgggggucucaaacauc

SEQ ID NO: 39130 - RNA, 22 nt, Artificial Sequence
  GATA2 Guide RNA
ugacuugggagagguggcagug

SEQ ID NO: 39131 - RNA, 22 nt, Artificial Sequence
  GATA2 Guide RNA
ugagacccccgggucagggaga

SEQ ID NO: 39132 - RNA, 22 nt, Artificial Sequence
  GATA2 Guide RNA
ugaugucucgcucuaauagccc

SEQ ID NO: 39133 - RNA, 22 nt, Artificial Sequence
  GATA2 Guide RNA
ugccaccucucccaagucacag

SEQ ID NO: 39134 - RNA, 22 nt, Artificial Sequence
  GATA2 Guide RNA
ugccauuuucuuaagugcuucc

SEQ ID NO: 39135 - RNA, 22 nt, Artificial Sequence
  GATA2 Guide RNA
ugccccaggguuggucacugcc

SEQ ID NO: 39136 - RNA, 22 nt, Artificial Sequence
  GATA2 Guide RNA
ugccugaccagaacauagaaca

SEQ ID NO: 39137 - RNA, 22 nt, Artificial Sequence
  GATA2 Guide RNA
ugcguuuuugugguggggagcu

SEQ ID NO: 39138 - RNA, 22 nt, Artificial Sequence
  GATA2 Guide RNA
ugcuccccucuuccacgaaguc

SEQ ID NO: 39139 - RNA, 22 nt, Artificial Sequence
  GATA2 Guide RNA
ugcuggggacuucguggaagag

SEQ ID NO: 39140 - RNA, 22 nt, Artificial Sequence
  GATA2 Guide RNA
ugcugggggcuauuagagcgag

SEQ ID NO: 39141 - RNA, 22 nt, Artificial Sequence
  GATA2 Guide RNA
ugcuuccaguguacccccaaag

SEQ ID NO: 39142 - RNA, 22 nt, Artificial Sequence
  GATA2 Guide RNA
uggaagaggggagcauuugcgu

SEQ ID NO: 39143 - RNA, 22 nt, Artificial Sequence
  GATA2 Guide RNA
uggaagcacuuaagaaaauggc

SEQ ID NO: 39144 - RNA, 22 nt, Artificial Sequence
  GATA2 Guide RNA
uggcaaaaguuuuagagucucc

SEQ ID NO: 39145 - RNA, 22 nt, Artificial Sequence
  GATA2 Guide RNA
uggcaguguugguuucccagau

SEQ ID NO: 39146 - RNA, 22 nt, Artificial Sequence
  GATA2 Guide RNA
ugggaaaccaacacugccaccu

SEQ ID NO: 39147 - RNA, 22 nt, Artificial Sequence
  GATA2 Guide RNA
ugggagagguggcaguguuggu

SEQ ID NO: 39148 - RNA, 22 nt, Artificial Sequence
  GATA2 Guide RNA
uggggacuucguggaagagggg

SEQ ID NO: 39149 - RNA, 22 nt, Artificial Sequence
  GATA2 Guide RNA
uggggagcugugacuugggaga

SEQ ID NO: 39150 - RNA, 22 nt, Artificial Sequence
  GATA2 Guide RNA
uggggaugggugaugucucgcu

SEQ ID NO: 39151 - RNA, 22 nt, Artificial Sequence
  GATA2 Guide RNA
uggggcaaggaacugaacuuug

SEQ ID NO: 39152 - RNA, 22 nt, Artificial Sequence
  GATA2 Guide RNA
ugggggcuauuagagcgagaca

SEQ ID NO: 39153 - RNA, 22 nt, Artificial Sequence
  GATA2 Guide RNA
uggggguacacuggaagcacuu

SEQ ID NO: 39154 - RNA, 22 nt, Artificial Sequence
  GATA2 Guide RNA
ugggugaugucucgcucuaaua

SEQ ID NO: 39155 - RNA, 22 nt, Artificial Sequence
  GATA2 Guide RNA
uggucacugccugaccagaaca

SEQ ID NO: 39156 - RNA, 22 nt, Artificial Sequence
  GATA2 Guide RNA
uggucaggcagugaccaacccu

SEQ ID NO: 39157 - RNA, 22 nt, Artificial Sequence
  GATA2 Guide RNA
ugguggggagcugugacuuggg

SEQ ID NO: 39158 - RNA, 22 nt, Artificial Sequence
  GATA2 Guide RNA
ugguuucccagaucuggggaug

SEQ ID NO: 39159 - RNA, 22 nt, Artificial Sequence
  GATA2 Guide RNA
uguacccccaaaguucaguucc

SEQ ID NO: 39160 - RNA, 22 nt, Artificial Sequence
  GATA2 Guide RNA
ugucucgcucuaauagccccca

SEQ ID NO: 39161 - RNA, 22 nt, Artificial Sequence
  GATA2 Guide RNA
ugugacuugggagagguggcag

SEQ ID NO: 39162 - RNA, 22 nt, Artificial Sequence
  GATA2 Guide RNA
ugugguggggagcugugacuug

SEQ ID NO: 39163 - RNA, 22 nt, Artificial Sequence
  GATA2 Guide RNA
uguucuauguucuggucaggca

SEQ ID NO: 39164 - RNA, 22 nt, Artificial Sequence
  GATA2 Guide RNA
uguucuggucaggcagugacca

SEQ ID NO: 39165 - RNA, 22 nt, Artificial Sequence
  GATA2 Guide RNA
uguugguuucccagaucugggg

SEQ ID NO: 39166 - RNA, 22 nt, Artificial Sequence
  GATA2 Guide RNA
uguuugagacccccgggucagg

SEQ ID NO: 39167 - RNA, 22 nt, Artificial Sequence
  GATA2 Guide RNA
uuaagauucagggagggaaagg

SEQ ID NO: 39168 - RNA, 22 nt, Artificial Sequence
  GATA2 Guide RNA
uuaagugcuuccaguguacccc

SEQ ID NO: 39169 - RNA, 22 nt, Artificial Sequence
  GATA2 Guide RNA
uuagagcgagacaucacccauc

SEQ ID NO: 39170 - RNA, 22 nt, Artificial Sequence
  GATA2 Guide RNA
uuagagucuccucucccugacc

SEQ ID NO: 39171 - RNA, 22 nt, Artificial Sequence
  GATA2 Guide RNA
uucacuuaagauucagggaggg

SEQ ID NO: 39172 - RNA, 22 nt, Artificial Sequence
  GATA2 Guide RNA
uucagggagggaaagggggaau

SEQ ID NO: 39173 - RNA, 22 nt, Artificial Sequence
  GATA2 Guide RNA
uucaguuccuugccccaggguu

SEQ ID NO: 39174 - RNA, 22 nt, Artificial Sequence
  GATA2 Guide RNA
uuccaguguacccccaaaguuc

SEQ ID NO: 39175 - RNA, 22 nt, Artificial Sequence
  GATA2 Guide RNA
uucccagaucuggggaugggug

SEQ ID NO: 39176 - RNA, 22 nt, Artificial Sequence
  GATA2 Guide RNA
uucccccuuucccucccugaau

SEQ ID NO: 39177 - RNA, 22 nt, Artificial Sequence
  GATA2 Guide RNA
uucccucccugaaucuuaagug

SEQ ID NO: 39178 - RNA, 22 nt, Artificial Sequence
  GATA2 Guide RNA
uuccuguucuauguucugguca

SEQ ID NO: 39179 - RNA, 22 nt, Artificial Sequence
  GATA2 Guide RNA
uuccuugccccaggguugguca

SEQ ID NO: 39180 - RNA, 22 nt, Artificial Sequence
  GATA2 Guide RNA
uucguggaagaggggagcauuu

SEQ ID NO: 39181 - RNA, 22 nt, Artificial Sequence
  GATA2 Guide RNA
uucuauguucuggucaggcagu

SEQ ID NO: 39182 - RNA, 22 nt, Artificial Sequence
  GATA2 Guide RNA
uucuggucaggcagugaccaac

SEQ ID NO: 39183 - RNA, 22 nt, Artificial Sequence
  GATA2 Guide RNA
uucuuaagugcuuccaguguac

SEQ ID NO: 39184 - RNA, 22 nt, Artificial Sequence
  GATA2 Guide RNA
uugagacccccgggucagggag

SEQ ID NO: 39185 - RNA, 22 nt, Artificial Sequence
  GATA2 Guide RNA
uugccauuuucuuaagugcuuc

SEQ ID NO: 39186 - RNA, 22 nt, Artificial Sequence
  GATA2 Guide RNA
uugccccaggguuggucacugc

SEQ ID NO: 39187 - RNA, 22 nt, Artificial Sequence
  GATA2 Guide RNA
uugcguuuuugugguggggagc

SEQ ID NO: 39188 - RNA, 22 nt, Artificial Sequence
  GATA2 Guide RNA
uugggagagguggcaguguugg

SEQ ID NO: 39189 - RNA, 22 nt, Artificial Sequence
  GATA2 Guide RNA
uuggggguacacuggaagcacu

SEQ ID NO: 39190 - RNA, 22 nt, Artificial Sequence
  GATA2 Guide RNA
uuggucacugccugaccagaac

SEQ ID NO: 39191 - RNA, 22 nt, Artificial Sequence
  GATA2 Guide RNA
uugguuucccagaucuggggau

SEQ ID NO: 39192 - RNA, 22 nt, Artificial Sequence
  GATA2 Guide RNA
uugugguggggagcugugacuu

SEQ ID NO: 39193 - RNA, 22 nt, Artificial Sequence
  GATA2 Guide RNA
uuuagagucuccucucccugac

SEQ ID NO: 39194 - RNA, 22 nt, Artificial Sequence
  GATA2 Guide RNA
uuucacuuaagauucagggagg

SEQ ID NO: 39195 - RNA, 22 nt, Artificial Sequence
  GATA2 Guide RNA
uuucccagaucuggggaugggu

SEQ ID NO: 39196 - RNA, 22 nt, Artificial Sequence
  GATA2 Guide RNA
uuucccucccugaaucuuaagu

SEQ ID NO: 39197 - RNA, 22 nt, Artificial Sequence
  GATA2 Guide RNA
uuucuuaagugcuuccagugua

SEQ ID NO: 39198 - RNA, 22 nt, Artificial Sequence
  GATA2 Guide RNA
uuugagacccccgggucaggga

SEQ ID NO: 39199 - RNA, 22 nt, Artificial Sequence
  GATA2 Guide RNA
uuugccauuuucuuaagugcuu

SEQ ID NO: 39200 - RNA, 22 nt, Artificial Sequence
  GATA2 Guide RNA
uuugcguuuuugugguggggag

SEQ ID NO: 39201 - RNA, 22 nt, Artificial Sequence
  GATA2 Guide RNA
uuuggggguacacuggaagcac

SEQ ID NO: 39202 - RNA, 22 nt, Artificial Sequence
  GATA2 Guide RNA
uuugugguggggagcugugacu

SEQ ID NO: 39203 - RNA, 22 nt, Artificial Sequence
  GATA2 Guide RNA
uuuuagagucuccucucccuga

SEQ ID NO: 39204 - RNA, 22 nt, Artificial Sequence
  GATA2 Guide RNA
uuuucacuuaagauucagggag

SEQ ID NO: 39205 - RNA, 22 nt, Artificial Sequence
  GATA2 Guide RNA
uuuucuuaagugcuuccagugu

SEQ ID NO: 39206 - RNA, 22 nt, Artificial Sequence
  GATA2 Guide RNA
uuuugccauuuucuuaagugcu

SEQ ID NO: 39207 - RNA, 22 nt, Artificial Sequence
  GATA2 Guide RNA
uuuugugguggggagcugugac

SEQ ID NO: 39208 - RNA, 22 nt, Artificial Sequence
  GATA2 Guide RNA
uuuuugugguggggagcuguga

SEQ ID NO: 39209 - RNA, 20 nt, Artificial Sequence
  GATA2 Guide RNA
aaaauuccaugguucugaga

SEQ ID NO: 39210 - RNA, 20 nt, Artificial Sequence
  GATA2 Guide RNA
aaagaacucucagaagccug

SEQ ID NO: 39211 - RNA, 20 nt, Artificial Sequence
  GATA2 Guide RNA
aaagcaucucagaaccaugg

SEQ ID NO: 39212 - RNA, 20 nt, Artificial Sequence
  GATA2 Guide RNA
aaaguucugugagucuugac

SEQ ID NO: 39213 - RNA, 20 nt, Artificial Sequence
  GATA2 Guide RNA
aaauaagucaagacucacag

SEQ ID NO: 39214 - RNA, 20 nt, Artificial Sequence
  GATA2 Guide RNA
aaaucucacaugggaaucaa

SEQ ID NO: 39215 - RNA, 20 nt, Artificial Sequence
  GATA2 Guide RNA
aaauuccaugguucugagau

SEQ ID NO: 39216 - RNA, 20 nt, Artificial Sequence
  GATA2 Guide RNA
aacaucaggcuucugagagu

SEQ ID NO: 39217 - RNA, 20 nt, Artificial Sequence
  GATA2 Guide RNA
aacgaaauaagucaagacuc

SEQ ID NO: 39218 - RNA, 20 nt, Artificial Sequence
  GATA2 Guide RNA
aacgggauugcaagagcuac

SEQ ID NO: 39219 - RNA, 20 nt, Artificial Sequence
  GATA2 Guide RNA
aacuacccugcgcucuaacu

SEQ ID NO: 39220 - RNA, 20 nt, Artificial Sequence
  GATA2 Guide RNA
aacucucagaagccugaugu

SEQ ID NO: 39221 - RNA, 20 nt, Artificial Sequence
  GATA2 Guide RNA
aacuuuggaauaaagaacuc

SEQ ID NO: 39222 - RNA, 20 nt, Artificial Sequence
  GATA2 Guide RNA
aagaacucucagaagccuga

SEQ ID NO: 39223 - RNA, 20 nt, Artificial Sequence
  GATA2 Guide RNA
aagacucacagaacuuugga

SEQ ID NO: 39224 - RNA, 20 nt, Artificial Sequence
  GATA2 Guide RNA
aagagcuacagaggagaauu

SEQ ID NO: 39225 - RNA, 20 nt, Artificial Sequence
  GATA2 Guide RNA
aagcaucucagaaccaugga

SEQ ID NO: 39226 - RNA, 20 nt, Artificial Sequence
  GATA2 Guide RNA
aaggagggcuaaaucucaca

SEQ ID NO: 39227 - RNA, 20 nt, Artificial Sequence
  GATA2 Guide RNA
aagucaagacucacagaacu

SEQ ID NO: 39228 - RNA, 20 nt, Artificial Sequence
  GATA2 Guide RNA
aaguucugugagucuugacu

SEQ ID NO: 39229 - RNA, 20 nt, Artificial Sequence
  GATA2 Guide RNA
aauaaagaacucucagaagc

SEQ ID NO: 39230 - RNA, 20 nt, Artificial Sequence
  GATA2 Guide RNA
aauaagucaagacucacaga

SEQ ID NO: 39231 - RNA, 20 nt, Artificial Sequence
  GATA2 Guide RNA
aaucaaagcaucucagaacc

SEQ ID NO: 39232 - RNA, 20 nt, Artificial Sequence
  GATA2 Guide RNA
aaucucacaugggaaucaaa

SEQ ID NO: 39233 - RNA, 20 nt, Artificial Sequence
  GATA2 Guide RNA
aauuagcuaccucccccaac

SEQ ID NO: 39234 - RNA, 20 nt, Artificial Sequence
  GATA2 Guide RNA
aauuccaugguucugagaug

SEQ ID NO: 39235 - RNA, 20 nt, Artificial Sequence
  GATA2 Guide RNA
aauucuccucuguagcucuu

SEQ ID NO: 39236 - RNA, 20 nt, Artificial Sequence
  GATA2 Guide RNA
acagaacuuuggaauaaaga

SEQ ID NO: 39237 - RNA, 20 nt, Artificial Sequence
  GATA2 Guide RNA
acagaggagaauuagcuacc

SEQ ID NO: 39238 - RNA, 20 nt, Artificial Sequence
  GATA2 Guide RNA
acaucaggcuucugagaguu

SEQ ID NO: 39239 - RNA, 20 nt, Artificial Sequence
  GATA2 Guide RNA
acaugggaaucaaagcaucu

SEQ ID NO: 39240 - RNA, 20 nt, Artificial Sequence
  GATA2 Guide RNA
accagcucagucaaggaggg

SEQ ID NO: 39241 - RNA, 20 nt, Artificial Sequence
  GATA2 Guide RNA
acccccaguccccaccagcu

SEQ ID NO: 39242 - RNA, 20 nt, Artificial Sequence
  GATA2 Guide RNA
accccccucccugacccucg

SEQ ID NO: 39243 - RNA, 20 nt, Artificial Sequence
  GATA2 Guide RNA
acccucgcuccacccccagu

SEQ ID NO: 39244 - RNA, 20 nt, Artificial Sequence
  GATA2 Guide RNA
acccugcgcucuaacuccau

SEQ ID NO: 39245 - RNA, 20 nt, Artificial Sequence
  GATA2 Guide RNA
accucccccaacuacccugc

SEQ ID NO: 39246 - RNA, 20 nt, Artificial Sequence
  GATA2 Guide RNA
accucgaccccccucccuga

SEQ ID NO: 39247 - RNA, 20 nt, Artificial Sequence
  GATA2 Guide RNA
acgaaauaagucaagacuca

SEQ ID NO: 39248 - RNA, 20 nt, Artificial Sequence
  GATA2 Guide RNA
acgcccaccucgaccccccu

SEQ ID NO: 39249 - RNA, 20 nt, Artificial Sequence
  GATA2 Guide RNA
acgggauugcaagagcuaca

SEQ ID NO: 39250 - RNA, 20 nt, Artificial Sequence
  GATA2 Guide RNA
acuacccugcgcucuaacuc

SEQ ID NO: 39251 - RNA, 20 nt, Artificial Sequence
  GATA2 Guide RNA
acucacagaacuuuggaaua

SEQ ID NO: 39252 - RNA, 20 nt, Artificial Sequence
  GATA2 Guide RNA
acucccacgcccaccucgac

SEQ ID NO: 39253 - RNA, 20 nt, Artificial Sequence
  GATA2 Guide RNA
acucucagaagccugauguu

SEQ ID NO: 39254 - RNA, 20 nt, Artificial Sequence
  GATA2 Guide RNA
acugagcugguggggacugg

SEQ ID NO: 39255 - RNA, 20 nt, Artificial Sequence
  GATA2 Guide RNA
acuggggguggagcgagggu

SEQ ID NO: 39256 - RNA, 20 nt, Artificial Sequence
  GATA2 Guide RNA
acuuuggaauaaagaacucu

SEQ ID NO: 39257 - RNA, 20 nt, Artificial Sequence
  GATA2 Guide RNA
agaaccauggaauuuuagaa

SEQ ID NO: 39258 - RNA, 20 nt, Artificial Sequence
  GATA2 Guide RNA
agaacgaaauaagucaagac

SEQ ID NO: 39259 - RNA, 20 nt, Artificial Sequence
  GATA2 Guide RNA
agaacucucagaagccugau

SEQ ID NO: 39260 - RNA, 20 nt, Artificial Sequence
  GATA2 Guide RNA
agaacuuuggaauaaagaac

SEQ ID NO: 39261 - RNA, 20 nt, Artificial Sequence
  GATA2 Guide RNA
agaauuagcuaccuccccca

SEQ ID NO: 39262 - RNA, 20 nt, Artificial Sequence
  GATA2 Guide RNA
agacucacagaacuuuggaa

SEQ ID NO: 39263 - RNA, 20 nt, Artificial Sequence
  GATA2 Guide RNA
agagcgcaggguaguugggg

SEQ ID NO: 39264 - RNA, 20 nt, Artificial Sequence
  GATA2 Guide RNA
agagcuacagaggagaauua

SEQ ID NO: 39265 - RNA, 20 nt, Artificial Sequence
  GATA2 Guide RNA
agaggagaauuagcuaccuc

SEQ ID NO: 39266 - RNA, 20 nt, Artificial Sequence
  GATA2 Guide RNA
agaguucuuuauuccaaagu

SEQ ID NO: 39267 - RNA, 20 nt, Artificial Sequence
  GATA2 Guide RNA
agaugcuuugauucccaugu

SEQ ID NO: 39268 - RNA, 20 nt, Artificial Sequence
  GATA2 Guide RNA
agauuuagcccuccuugacu

SEQ ID NO: 39269 - RNA, 20 nt, Artificial Sequence
  GATA2 Guide RNA
agcaggcuggacucccacgc

SEQ ID NO: 39270 - RNA, 20 nt, Artificial Sequence
  GATA2 Guide RNA
agcaucucagaaccauggaa

SEQ ID NO: 39271 - RNA, 20 nt, Artificial Sequence
  GATA2 Guide RNA
agcccuccuugacugagcug

SEQ ID NO: 39272 - RNA, 20 nt, Artificial Sequence
  GATA2 Guide RNA
agcgagggucagggaggggg

SEQ ID NO: 39273 - RNA, 20 nt, Artificial Sequence
  GATA2 Guide RNA
agcgcaggguaguuggggga

SEQ ID NO: 39274 - RNA, 20 nt, Artificial Sequence
  GATA2 Guide RNA
agcuaauucuccucuguagc

SEQ ID NO: 39275 - RNA, 20 nt, Artificial Sequence
  GATA2 Guide RNA
agcuacagaggagaauuagc

SEQ ID NO: 39276 - RNA, 20 nt, Artificial Sequence
  GATA2 Guide RNA
agcuaccucccccaacuacc

SEQ ID NO: 39277 - RNA, 20 nt, Artificial Sequence
  GATA2 Guide RNA
agcucagucaaggagggcua

SEQ ID NO: 39278 - RNA, 20 nt, Artificial Sequence
  GATA2 Guide RNA
agcugguggggacugggggu

SEQ ID NO: 39279 - RNA, 20 nt, Artificial Sequence
  GATA2 Guide RNA
aggagaauuagcuaccuccc

SEQ ID NO: 39280 - RNA, 20 nt, Artificial Sequence
  GATA2 Guide RNA
aggagggcuaaaucucacau

SEQ ID NO: 39281 - RNA, 20 nt, Artificial Sequence
  GATA2 Guide RNA
aggcuggacucccacgccca

SEQ ID NO: 39282 - RNA, 20 nt, Artificial Sequence
  GATA2 Guide RNA
aggcuucugagaguucuuua

SEQ ID NO: 39283 - RNA, 20 nt, Artificial Sequence
  GATA2 Guide RNA
agggaggggggucgaggugg

SEQ ID NO: 39284 - RNA, 20 nt, Artificial Sequence
  GATA2 Guide RNA
agggcuaaaucucacauggg

SEQ ID NO: 39285 - RNA, 20 nt, Artificial Sequence
  GATA2 Guide RNA
aggggggucgaggugggcgu

SEQ ID NO: 39286 - RNA, 20 nt, Artificial Sequence
  GATA2 Guide RNA
aggguaguugggggagguag

SEQ ID NO: 39287 - RNA, 20 nt, Artificial Sequence
  GATA2 Guide RNA
agggucagggaggggggucg

SEQ ID NO: 39288 - RNA, 20 nt, Artificial Sequence
  GATA2 Guide RNA
agguagcuaauucuccucug

SEQ ID NO: 39289 - RNA, 20 nt, Artificial Sequence
  GATA2 Guide RNA
aggugggcgugggaguccag

SEQ ID NO: 39290 - RNA, 20 nt, Artificial Sequence
  GATA2 Guide RNA
agucaagacucacagaacuu

SEQ ID NO: 39291 - RNA, 20 nt, Artificial Sequence
  GATA2 Guide RNA
agucaaggagggcuaaaucu

SEQ ID NO: 39292 - RNA, 20 nt, Artificial Sequence
  GATA2 Guide RNA
aguccccaccagcucaguca

SEQ ID NO: 39293 - RNA, 20 nt, Artificial Sequence
  GATA2 Guide RNA
agucuugacuuauuucguuc

SEQ ID NO: 39294 - RNA, 20 nt, Artificial Sequence
  GATA2 Guide RNA
aguuagagcgcaggguaguu

SEQ ID NO: 39295 - RNA, 20 nt, Artificial Sequence
  GATA2 Guide RNA
aguucugugagucuugacuu

SEQ ID NO: 39296 - RNA, 20 nt, Artificial Sequence
  GATA2 Guide RNA
aguucuuuauuccaaaguuc

SEQ ID NO: 39297 - RNA, 20 nt, Artificial Sequence
  GATA2 Guide RNA
aguugggggagguagcuaau

SEQ ID NO: 39298 - RNA, 20 nt, Artificial Sequence
  GATA2 Guide RNA
auaaagaacucucagaagcc

SEQ ID NO: 39299 - RNA, 20 nt, Artificial Sequence
  GATA2 Guide RNA
auaagucaagacucacagaa

SEQ ID NO: 39300 - RNA, 20 nt, Artificial Sequence
  GATA2 Guide RNA
aucaaagcaucucagaacca

SEQ ID NO: 39301 - RNA, 20 nt, Artificial Sequence
  GATA2 Guide RNA
aucaggcuucugagaguucu

SEQ ID NO: 39302 - RNA, 20 nt, Artificial Sequence
  GATA2 Guide RNA
aucucacaugggaaucaaag

SEQ ID NO: 39303 - RNA, 20 nt, Artificial Sequence
  GATA2 Guide RNA
aucucagaaccauggaauuu

SEQ ID NO: 39304 - RNA, 20 nt, Artificial Sequence
  GATA2 Guide RNA
augcuuugauucccauguga

SEQ ID NO: 39305 - RNA, 20 nt, Artificial Sequence
  GATA2 Guide RNA
auggaguuagagcgcagggu

SEQ ID NO: 39306 - RNA, 20 nt, Artificial Sequence
  GATA2 Guide RNA
augggaaucaaagcaucuca

SEQ ID NO: 39307 - RNA, 20 nt, Artificial Sequence
  GATA2 Guide RNA
augguucugagaugcuuuga

SEQ ID NO: 39308 - RNA, 20 nt, Artificial Sequence
  GATA2 Guide RNA
augugagauuuagcccuccu

SEQ ID NO: 39309 - RNA, 20 nt, Artificial Sequence
  GATA2 Guide RNA
auuagcuaccucccccaacu

SEQ ID NO: 39310 - RNA, 20 nt, Artificial Sequence
  GATA2 Guide RNA
auuccaaaguucugugaguc

SEQ ID NO: 39311 - RNA, 20 nt, Artificial Sequence
  GATA2 Guide RNA
auuccaugguucugagaugc

SEQ ID NO: 39312 - RNA, 20 nt, Artificial Sequence
  GATA2 Guide RNA
auucccaugugagauuuagc

SEQ ID NO: 39313 - RNA, 20 nt, Artificial Sequence
  GATA2 Guide RNA
auucuaaaauuccaugguuc

SEQ ID NO: 39314 - RNA, 20 nt, Artificial Sequence
  GATA2 Guide RNA
auucuccucuguagcucuug

SEQ ID NO: 39315 - RNA, 20 nt, Artificial Sequence
  GATA2 Guide RNA
auugcaagagcuacagagga

SEQ ID NO: 39316 - RNA, 20 nt, Artificial Sequence
  GATA2 Guide RNA
auuuagcccuccuugacuga

SEQ ID NO: 39317 - RNA, 20 nt, Artificial Sequence
  GATA2 Guide RNA
auuuauggaguuagagcgca

SEQ ID NO: 39318 - RNA, 20 nt, Artificial Sequence
  GATA2 Guide RNA
auuugagaacgaaauaaguc

SEQ ID NO: 39319 - RNA, 20 nt, Artificial Sequence
  GATA2 Guide RNA
caaagcaucucagaaccaug

SEQ ID NO: 39320 - RNA, 20 nt, Artificial Sequence
  GATA2 Guide RNA
caaaguucugugagucuuga

SEQ ID NO: 39321 - RNA, 20 nt, Artificial Sequence
  GATA2 Guide RNA
caaauucuaaaauuccaugg

SEQ ID NO: 39322 - RNA, 20 nt, Artificial Sequence
  GATA2 Guide RNA
caacgggauugcaagagcua

SEQ ID NO: 39323 - RNA, 20 nt, Artificial Sequence
  GATA2 Guide RNA
caacuacccugcgcucuaac

SEQ ID NO: 39324 - RNA, 20 nt, Artificial Sequence
  GATA2 Guide RNA
caagacucacagaacuuugg

SEQ ID NO: 39325 - RNA, 20 nt, Artificial Sequence
  GATA2 Guide RNA
caagagcuacagaggagaau

SEQ ID NO: 39326 - RNA, 20 nt, Artificial Sequence
  GATA2 Guide RNA
caaggagggcuaaaucucac

SEQ ID NO: 39327 - RNA, 20 nt, Artificial Sequence
  GATA2 Guide RNA
cacagaacuuuggaauaaag

SEQ ID NO: 39328 - RNA, 20 nt, Artificial Sequence
  GATA2 Guide RNA
cacaugggaaucaaagcauc

SEQ ID NO: 39329 - RNA, 20 nt, Artificial Sequence
  GATA2 Guide RNA
caccagcucagucaaggagg

SEQ ID NO: 39330 - RNA, 20 nt, Artificial Sequence
  GATA2 Guide RNA
cacccccaguccccaccagc

SEQ ID NO: 39331 - RNA, 20 nt, Artificial Sequence
  GATA2 Guide RNA
caccucgaccccccucccug

SEQ ID NO: 39332 - RNA, 20 nt, Artificial Sequence
  GATA2 Guide RNA
cacgcccaccucgacccccc

SEQ ID NO: 39333 - RNA, 20 nt, Artificial Sequence
  GATA2 Guide RNA
cagaaccauggaauuuuaga

SEQ ID NO: 39334 - RNA, 20 nt, Artificial Sequence
  GATA2 Guide RNA
cagaacuuuggaauaaagaa

SEQ ID NO: 39335 - RNA, 20 nt, Artificial Sequence
  GATA2 Guide RNA
cagaggagaauuagcuaccu

SEQ ID NO: 39336 - RNA, 20 nt, Artificial Sequence
  GATA2 Guide RNA
cagcaggcuggacucccacg

SEQ ID NO: 39337 - RNA, 20 nt, Artificial Sequence
  GATA2 Guide RNA
cagcucagucaaggagggcu

SEQ ID NO: 39338 - RNA, 20 nt, Artificial Sequence
  GATA2 Guide RNA
caggcuggacucccacgccc

SEQ ID NO: 39339 - RNA, 20 nt, Artificial Sequence
  GATA2 Guide RNA
caggcuucugagaguucuuu

SEQ ID NO: 39340 - RNA, 20 nt, Artificial Sequence
  GATA2 Guide RNA
cagggaggggggucgaggug

SEQ ID NO: 39341 - RNA, 20 nt, Artificial Sequence
  GATA2 Guide RNA
caggguaguugggggaggua

SEQ ID NO: 39342 - RNA, 20 nt, Artificial Sequence
  GATA2 Guide RNA
cagucaaggagggcuaaauc

SEQ ID NO: 39343 - RNA, 20 nt, Artificial Sequence
  GATA2 Guide RNA
caguccccaccagcucaguc

SEQ ID NO: 39344 - RNA, 20 nt, Artificial Sequence
  GATA2 Guide RNA
caucaggcuucugagaguuc

SEQ ID NO: 39345 - RNA, 20 nt, Artificial Sequence
  GATA2 Guide RNA
caucucagaaccauggaauu

SEQ ID NO: 39346 - RNA, 20 nt, Artificial Sequence
  GATA2 Guide RNA
caugggaaucaaagcaucuc

SEQ ID NO: 39347 - RNA, 20 nt, Artificial Sequence
  GATA2 Guide RNA
caugguucugagaugcuuug

SEQ ID NO: 39348 - RNA, 20 nt, Artificial Sequence
  GATA2 Guide RNA
caugugagauuuagcccucc

SEQ ID NO: 39349 - RNA, 20 nt, Artificial Sequence
  GATA2 Guide RNA
cauuuauggaguuagagcgc

SEQ ID NO: 39350 - RNA, 20 nt, Artificial Sequence
  GATA2 Guide RNA
ccaaaguucugugagucuug

SEQ ID NO: 39351 - RNA, 20 nt, Artificial Sequence
  GATA2 Guide RNA
ccaacuacccugcgcucuaa

SEQ ID NO: 39352 - RNA, 20 nt, Artificial Sequence
  GATA2 Guide RNA
ccaccagcucagucaaggag

SEQ ID NO: 39353 - RNA, 20 nt, Artificial Sequence
  GATA2 Guide RNA
ccacccccaguccccaccag

SEQ ID NO: 39354 - RNA, 20 nt, Artificial Sequence
  GATA2 Guide RNA
ccaccucgaccccccucccu

SEQ ID NO: 39355 - RNA, 20 nt, Artificial Sequence
  GATA2 Guide RNA
ccacgcccaccucgaccccc

SEQ ID NO: 39356 - RNA, 20 nt, Artificial Sequence
  GATA2 Guide RNA
ccagcucagucaaggagggc

SEQ ID NO: 39357 - RNA, 20 nt, Artificial Sequence
  GATA2 Guide RNA
ccaguccccaccagcucagu

SEQ ID NO: 39358 - RNA, 20 nt, Artificial Sequence
  GATA2 Guide RNA
ccauggaauuuuagaauuug

SEQ ID NO: 39359 - RNA, 20 nt, Artificial Sequence
  GATA2 Guide RNA
ccaugguucugagaugcuuu

SEQ ID NO: 39360 - RNA, 20 nt, Artificial Sequence
  GATA2 Guide RNA
ccaugugagauuuagcccuc

SEQ ID NO: 39361 - RNA, 20 nt, Artificial Sequence
  GATA2 Guide RNA
ccauuuauggaguuagagcg

SEQ ID NO: 39362 - RNA, 20 nt, Artificial Sequence
  GATA2 Guide RNA
cccaacuacccugcgcucua

SEQ ID NO: 39363 - RNA, 20 nt, Artificial Sequence
  GATA2 Guide RNA
cccaccagcucagucaagga

SEQ ID NO: 39364 - RNA, 20 nt, Artificial Sequence
  GATA2 Guide RNA
cccaccucgaccccccuccc

SEQ ID NO: 39365 - RNA, 20 nt, Artificial Sequence
  GATA2 Guide RNA
cccacgcccaccucgacccc

SEQ ID NO: 39366 - RNA, 20 nt, Artificial Sequence
  GATA2 Guide RNA
cccaguccccaccagcucag

SEQ ID NO: 39367 - RNA, 20 nt, Artificial Sequence
  GATA2 Guide RNA
cccaugugagauuuagcccu

SEQ ID NO: 39368 - RNA, 20 nt, Artificial Sequence
  GATA2 Guide RNA
cccauuuauggaguuagagc

SEQ ID NO: 39369 - RNA, 20 nt, Artificial Sequence
  GATA2 Guide RNA
ccccaacuacccugcgcucu

SEQ ID NO: 39370 - RNA, 20 nt, Artificial Sequence
  GATA2 Guide RNA
ccccaccagcucagucaagg

SEQ ID NO: 39371 - RNA, 20 nt, Artificial Sequence
  GATA2 Guide RNA
ccccaguccccaccagcuca

SEQ ID NO: 39372 - RNA, 20 nt, Artificial Sequence
  GATA2 Guide RNA
ccccauuuauggaguuagag

SEQ ID NO: 39373 - RNA, 20 nt, Artificial Sequence
  GATA2 Guide RNA
cccccaacuacccugcgcuc

SEQ ID NO: 39374 - RNA, 20 nt, Artificial Sequence
  GATA2 Guide RNA
cccccaguccccaccagcuc

SEQ ID NO: 39375 - RNA, 20 nt, Artificial Sequence
  GATA2 Guide RNA
ccccccucccugacccucgc

SEQ ID NO: 39376 - RNA, 20 nt, Artificial Sequence
  GATA2 Guide RNA
cccccucccugacccucgcu

SEQ ID NO: 39377 - RNA, 20 nt, Artificial Sequence
  GATA2 Guide RNA
ccccucccugacccucgcuc

SEQ ID NO: 39378 - RNA, 20 nt, Artificial Sequence
  GATA2 Guide RNA
cccucccugacccucgcucc

SEQ ID NO: 39379 - RNA, 20 nt, Artificial Sequence
  GATA2 Guide RNA
cccuccuugacugagcuggu

SEQ ID NO: 39380 - RNA, 20 nt, Artificial Sequence
  GATA2 Guide RNA
cccucgcuccacccccaguc

SEQ ID NO: 39381 - RNA, 20 nt, Artificial Sequence
  GATA2 Guide RNA
cccugacccucgcuccaccc

SEQ ID NO: 39382 - RNA, 20 nt, Artificial Sequence
  GATA2 Guide RNA
cccugcgcucuaacuccaua

SEQ ID NO: 39383 - RNA, 20 nt, Artificial Sequence
  GATA2 Guide RNA
ccucccccaacuacccugcg

SEQ ID NO: 39384 - RNA, 20 nt, Artificial Sequence
  GATA2 Guide RNA
ccucccugacccucgcucca

SEQ ID NO: 39385 - RNA, 20 nt, Artificial Sequence
  GATA2 Guide RNA
ccuccuugacugagcuggug

SEQ ID NO: 39386 - RNA, 20 nt, Artificial Sequence
  GATA2 Guide RNA
ccucgaccccccucccugac

SEQ ID NO: 39387 - RNA, 20 nt, Artificial Sequence
  GATA2 Guide RNA
ccucgcuccacccccagucc

SEQ ID NO: 39388 - RNA, 20 nt, Artificial Sequence
  GATA2 Guide RNA
ccucuguagcucuugcaauc

SEQ ID NO: 39389 - RNA, 20 nt, Artificial Sequence
  GATA2 Guide RNA
ccugacccucgcuccacccc

SEQ ID NO: 39390 - RNA, 20 nt, Artificial Sequence
  GATA2 Guide RNA
ccugcgcucuaacuccauaa

SEQ ID NO: 39391 - RNA, 20 nt, Artificial Sequence
  GATA2 Guide RNA
ccuugacugagcuggugggg

SEQ ID NO: 39392 - RNA, 20 nt, Artificial Sequence
  GATA2 Guide RNA
cgaaauaagucaagacucac

SEQ ID NO: 39393 - RNA, 20 nt, Artificial Sequence
  GATA2 Guide RNA
cgaccccccucccugacccu

SEQ ID NO: 39394 - RNA, 20 nt, Artificial Sequence
  GATA2 Guide RNA
cgagggucagggaggggggu

SEQ ID NO: 39395 - RNA, 20 nt, Artificial Sequence
  GATA2 Guide RNA
cgaggugggcgugggagucc

SEQ ID NO: 39396 - RNA, 20 nt, Artificial Sequence
  GATA2 Guide RNA
cgcaggguaguugggggagg

SEQ ID NO: 39397 - RNA, 20 nt, Artificial Sequence
  GATA2 Guide RNA
cgcccaccucgaccccccuc

SEQ ID NO: 39398 - RNA, 20 nt, Artificial Sequence
  GATA2 Guide RNA
cgcuccacccccagucccca

SEQ ID NO: 39399 - RNA, 20 nt, Artificial Sequence
  GATA2 Guide RNA
cgggauugcaagagcuacag

SEQ ID NO: 39400 - RNA, 20 nt, Artificial Sequence
  GATA2 Guide RNA
cuaaaauuccaugguucuga

SEQ ID NO: 39401 - RNA, 20 nt, Artificial Sequence
  GATA2 Guide RNA
cuaaaucucacaugggaauc

SEQ ID NO: 39402 - RNA, 20 nt, Artificial Sequence
  GATA2 Guide RNA
cuaacaucaggcuucugaga

SEQ ID NO: 39403 - RNA, 20 nt, Artificial Sequence
  GATA2 Guide RNA
cuaauucuccucuguagcuc

SEQ ID NO: 39404 - RNA, 20 nt, Artificial Sequence
  GATA2 Guide RNA
cuacagaggagaauuagcua

SEQ ID NO: 39405 - RNA, 20 nt, Artificial Sequence
  GATA2 Guide RNA
cuacccugcgcucuaacucc

SEQ ID NO: 39406 - RNA, 20 nt, Artificial Sequence
  GATA2 Guide RNA
cuaccucccccaacuacccu

SEQ ID NO: 39407 - RNA, 20 nt, Artificial Sequence
  GATA2 Guide RNA
cucacagaacuuuggaauaa

SEQ ID NO: 39408 - RNA, 20 nt, Artificial Sequence
  GATA2 Guide RNA
cucacaugggaaucaaagca

SEQ ID NO: 39409 - RNA, 20 nt, Artificial Sequence
  GATA2 Guide RNA
cucagaaccauggaauuuua

SEQ ID NO: 39410 - RNA, 20 nt, Artificial Sequence
  GATA2 Guide RNA
cucagucaaggagggcuaaa

SEQ ID NO: 39411 - RNA, 20 nt, Artificial Sequence
  GATA2 Guide RNA
cuccacccccaguccccacc

SEQ ID NO: 39412 - RNA, 20 nt, Artificial Sequence
  GATA2 Guide RNA
cucccacgcccaccucgacc

SEQ ID NO: 39413 - RNA, 20 nt, Artificial Sequence
  GATA2 Guide RNA
cucccccaacuacccugcgc

SEQ ID NO: 39414 - RNA, 20 nt, Artificial Sequence
  GATA2 Guide RNA
cucccugacccucgcuccac

SEQ ID NO: 39415 - RNA, 20 nt, Artificial Sequence
  GATA2 Guide RNA
cuccucuguagcucuugcaa

SEQ ID NO: 39416 - RNA, 20 nt, Artificial Sequence
  GATA2 Guide RNA
cuccuugacugagcuggugg

SEQ ID NO: 39417 - RNA, 20 nt, Artificial Sequence
  GATA2 Guide RNA
cucgaccccccucccugacc

SEQ ID NO: 39418 - RNA, 20 nt, Artificial Sequence
  GATA2 Guide RNA
cucgcuccacccccaguccc

SEQ ID NO: 39419 - RNA, 20 nt, Artificial Sequence
  GATA2 Guide RNA
cucuguagcucuugcaaucc

SEQ ID NO: 39420 - RNA, 20 nt, Artificial Sequence
  GATA2 Guide RNA
cugacccucgcuccaccccc

SEQ ID NO: 39421 - RNA, 20 nt, Artificial Sequence
  GATA2 Guide RNA
cugagaguucuuuauuccaa

SEQ ID NO: 39422 - RNA, 20 nt, Artificial Sequence
  GATA2 Guide RNA
cugagaugcuuugauuccca

SEQ ID NO: 39423 - RNA, 20 nt, Artificial Sequence
  GATA2 Guide RNA
cugagcugguggggacuggg

SEQ ID NO: 39424 - RNA, 20 nt, Artificial Sequence
  GATA2 Guide RNA
cugcgcucuaacuccauaaa

SEQ ID NO: 39425 - RNA, 20 nt, Artificial Sequence
  GATA2 Guide RNA
cuggacucccacgcccaccu

SEQ ID NO: 39426 - RNA, 20 nt, Artificial Sequence
  GATA2 Guide RNA
cuggggguggagcgaggguc

SEQ ID NO: 39427 - RNA, 20 nt, Artificial Sequence
  GATA2 Guide RNA
cugguggggacugggggugg

SEQ ID NO: 39428 - RNA, 20 nt, Artificial Sequence
  GATA2 Guide RNA
cuguagcucuugcaaucccg

SEQ ID NO: 39429 - RNA, 20 nt, Artificial Sequence
  GATA2 Guide RNA
cugugagucuugacuuauuu

SEQ ID NO: 39430 - RNA, 20 nt, Artificial Sequence
  GATA2 Guide RNA
cuuauuucguucucaaauuc

SEQ ID NO: 39431 - RNA, 20 nt, Artificial Sequence
  GATA2 Guide RNA
cuucugagaguucuuuauuc

SEQ ID NO: 39432 - RNA, 20 nt, Artificial Sequence
  GATA2 Guide RNA
cuugacugagcuggugggga

SEQ ID NO: 39433 - RNA, 20 nt, Artificial Sequence
  GATA2 Guide RNA
cuugacuuauuucguucuca

SEQ ID NO: 39434 - RNA, 20 nt, Artificial Sequence
  GATA2 Guide RNA
cuuuauuccaaaguucugug

SEQ ID NO: 39435 - RNA, 20 nt, Artificial Sequence
  GATA2 Guide RNA
cuuugauucccaugugagau

SEQ ID NO: 39436 - RNA, 20 nt, Artificial Sequence
  GATA2 Guide RNA
cuuuggaauaaagaacucuc

SEQ ID NO: 39437 - RNA, 20 nt, Artificial Sequence
  GATA2 Guide RNA
gaaauaagucaagacucaca

SEQ ID NO: 39438 - RNA, 20 nt, Artificial Sequence
  GATA2 Guide RNA
gaaccauggaauuuuagaau

SEQ ID NO: 39439 - RNA, 20 nt, Artificial Sequence
  GATA2 Guide RNA
gaacgaaauaagucaagacu

SEQ ID NO: 39440 - RNA, 20 nt, Artificial Sequence
  GATA2 Guide RNA
gaacucucagaagccugaug

SEQ ID NO: 39441 - RNA, 20 nt, Artificial Sequence
  GATA2 Guide RNA
gaacuuuggaauaaagaacu

SEQ ID NO: 39442 - RNA, 20 nt, Artificial Sequence
  GATA2 Guide RNA
gaauaaagaacucucagaag

SEQ ID NO: 39443 - RNA, 20 nt, Artificial Sequence
  GATA2 Guide RNA
gaaucaaagcaucucagaac

SEQ ID NO: 39444 - RNA, 20 nt, Artificial Sequence
  GATA2 Guide RNA
gaauuagcuaccucccccaa

SEQ ID NO: 39445 - RNA, 20 nt, Artificial Sequence
  GATA2 Guide RNA
gaauuugagaacgaaauaag

SEQ ID NO: 39446 - RNA, 20 nt, Artificial Sequence
  GATA2 Guide RNA
gaccccccucccugacccuc

SEQ ID NO: 39447 - RNA, 20 nt, Artificial Sequence
  GATA2 Guide RNA
gacccucgcuccacccccag

SEQ ID NO: 39448 - RNA, 20 nt, Artificial Sequence
  GATA2 Guide RNA
gacucacagaacuuuggaau

SEQ ID NO: 39449 - RNA, 20 nt, Artificial Sequence
  GATA2 Guide RNA
gacucccacgcccaccucga

SEQ ID NO: 39450 - RNA, 20 nt, Artificial Sequence
  GATA2 Guide RNA
gacugagcugguggggacug

SEQ ID NO: 39451 - RNA, 20 nt, Artificial Sequence
  GATA2 Guide RNA
gacuggggguggagcgaggg

SEQ ID NO: 39452 - RNA, 20 nt, Artificial Sequence
  GATA2 Guide RNA
gacuuauuucguucucaaau

SEQ ID NO: 39453 - RNA, 20 nt, Artificial Sequence
  GATA2 Guide RNA
gagaacgaaauaagucaaga

SEQ ID NO: 39454 - RNA, 20 nt, Artificial Sequence
  GATA2 Guide RNA
gagaauuagcuaccuccccc

SEQ ID NO: 39455 - RNA, 20 nt, Artificial Sequence
  GATA2 Guide RNA
gagaguucuuuauuccaaag

SEQ ID NO: 39456 - RNA, 20 nt, Artificial Sequence
  GATA2 Guide RNA
gagaugcuuugauucccaug

SEQ ID NO: 39457 - RNA, 20 nt, Artificial Sequence
  GATA2 Guide RNA
gagauuuagcccuccuugac

SEQ ID NO: 39458 - RNA, 20 nt, Artificial Sequence
  GATA2 Guide RNA
gagcgagggucagggagggg

SEQ ID NO: 39459 - RNA, 20 nt, Artificial Sequence
  GATA2 Guide RNA
gagcgcaggguaguuggggg

SEQ ID NO: 39460 - RNA, 20 nt, Artificial Sequence
  GATA2 Guide RNA
gagcuacagaggagaauuag

SEQ ID NO: 39461 - RNA, 20 nt, Artificial Sequence
  GATA2 Guide RNA
gagcugguggggacuggggg

SEQ ID NO: 39462 - RNA, 20 nt, Artificial Sequence
  GATA2 Guide RNA
gaggagaauuagcuaccucc

SEQ ID NO: 39463 - RNA, 20 nt, Artificial Sequence
  GATA2 Guide RNA
gagggcuaaaucucacaugg

SEQ ID NO: 39464 - RNA, 20 nt, Artificial Sequence
  GATA2 Guide RNA
gaggggggucgaggugggcg

SEQ ID NO: 39465 - RNA, 20 nt, Artificial Sequence
  GATA2 Guide RNA
gagggucagggagggggguc

SEQ ID NO: 39466 - RNA, 20 nt, Artificial Sequence
  GATA2 Guide RNA
gagguagcuaauucuccucu

SEQ ID NO: 39467 - RNA, 20 nt, Artificial Sequence
  GATA2 Guide RNA
gaggugggcgugggagucca

SEQ ID NO: 39468 - RNA, 20 nt, Artificial Sequence
  GATA2 Guide RNA
gagucuugacuuauuucguu

SEQ ID NO: 39469 - RNA, 20 nt, Artificial Sequence
  GATA2 Guide RNA
gaguuagagcgcaggguagu

SEQ ID NO: 39470 - RNA, 20 nt, Artificial Sequence
  GATA2 Guide RNA
gaguucuuuauuccaaaguu

SEQ ID NO: 39471 - RNA, 20 nt, Artificial Sequence
  GATA2 Guide RNA
gaugcuuugauucccaugug

SEQ ID NO: 39472 - RNA, 20 nt, Artificial Sequence
  GATA2 Guide RNA
gauucccaugugagauuuag

SEQ ID NO: 39473 - RNA, 20 nt, Artificial Sequence
  GATA2 Guide RNA
gauugcaagagcuacagagg

SEQ ID NO: 39474 - RNA, 20 nt, Artificial Sequence
  GATA2 Guide RNA
gauuuagcccuccuugacug

SEQ ID NO: 39475 - RNA, 20 nt, Artificial Sequence
  GATA2 Guide RNA
gcaagagcuacagaggagaa

SEQ ID NO: 39476 - RNA, 20 nt, Artificial Sequence
  GATA2 Guide RNA
gcaggcuggacucccacgcc

SEQ ID NO: 39477 - RNA, 20 nt, Artificial Sequence
  GATA2 Guide RNA
gcaggguaguugggggaggu

SEQ ID NO: 39478 - RNA, 20 nt, Artificial Sequence
  GATA2 Guide RNA
gcaucucagaaccauggaau

SEQ ID NO: 39479 - RNA, 20 nt, Artificial Sequence
  GATA2 Guide RNA
gcccaccucgaccccccucc

SEQ ID NO: 39480 - RNA, 20 nt, Artificial Sequence
  GATA2 Guide RNA
gcccuccuugacugagcugg

SEQ ID NO: 39481 - RNA, 20 nt, Artificial Sequence
  GATA2 Guide RNA
gcgagggucagggagggggg

SEQ ID NO: 39482 - RNA, 20 nt, Artificial Sequence
  GATA2 Guide RNA
gcgcaggguaguugggggag

SEQ ID NO: 39483 - RNA, 20 nt, Artificial Sequence
  GATA2 Guide RNA
gcgcucuaacuccauaaaug

SEQ ID NO: 39484 - RNA, 20 nt, Artificial Sequence
  GATA2 Guide RNA
gcuaaaucucacaugggaau

SEQ ID NO: 39485 - RNA, 20 nt, Artificial Sequence
  GATA2 Guide RNA
gcuaauucuccucuguagcu

SEQ ID NO: 39486 - RNA, 20 nt, Artificial Sequence
  GATA2 Guide RNA
gcuacagaggagaauuagcu

SEQ ID NO: 39487 - RNA, 20 nt, Artificial Sequence
  GATA2 Guide RNA
gcuaccucccccaacuaccc

SEQ ID NO: 39488 - RNA, 20 nt, Artificial Sequence
  GATA2 Guide RNA
gcucagucaaggagggcuaa

SEQ ID NO: 39489 - RNA, 20 nt, Artificial Sequence
  GATA2 Guide RNA
gcuccacccccaguccccac

SEQ ID NO: 39490 - RNA, 20 nt, Artificial Sequence
  GATA2 Guide RNA
gcuggacucccacgcccacc

SEQ ID NO: 39491 - RNA, 20 nt, Artificial Sequence
  GATA2 Guide RNA
gcugguggggacugggggug

SEQ ID NO: 39492 - RNA, 20 nt, Artificial Sequence
  GATA2 Guide RNA
gcuucugagaguucuuuauu

SEQ ID NO: 39493 - RNA, 20 nt, Artificial Sequence
  GATA2 Guide RNA
gcuuugauucccaugugaga

SEQ ID NO: 39494 - RNA, 20 nt, Artificial Sequence
  GATA2 Guide RNA
ggaauaaagaacucucagaa

SEQ ID NO: 39495 - RNA, 20 nt, Artificial Sequence
  GATA2 Guide RNA
ggaaucaaagcaucucagaa

SEQ ID NO: 39496 - RNA, 20 nt, Artificial Sequence
  GATA2 Guide RNA
ggacucccacgcccaccucg

SEQ ID NO: 39497 - RNA, 20 nt, Artificial Sequence
  GATA2 Guide RNA
ggacuggggguggagcgagg

SEQ ID NO: 39498 - RNA, 20 nt, Artificial Sequence
  GATA2 Guide RNA
ggagaauuagcuaccucccc

SEQ ID NO: 39499 - RNA, 20 nt, Artificial Sequence
  GATA2 Guide RNA
ggagcgagggucagggaggg

SEQ ID NO: 39500 - RNA, 20 nt, Artificial Sequence
  GATA2 Guide RNA
ggagggcuaaaucucacaug

SEQ ID NO: 39501 - RNA, 20 nt, Artificial Sequence
  GATA2 Guide RNA
ggaggggggucgaggugggc

SEQ ID NO: 39502 - RNA, 20 nt, Artificial Sequence
  GATA2 Guide RNA
ggagguagcuaauucuccuc

SEQ ID NO: 39503 - RNA, 20 nt, Artificial Sequence
  GATA2 Guide RNA
ggaguuagagcgcaggguag

SEQ ID NO: 39504 - RNA, 20 nt, Artificial Sequence
  GATA2 Guide RNA
ggauugcaagagcuacagag

SEQ ID NO: 39505 - RNA, 20 nt, Artificial Sequence
  GATA2 Guide RNA
ggcuaaaucucacaugggaa

SEQ ID NO: 39506 - RNA, 20 nt, Artificial Sequence
  GATA2 Guide RNA
ggcuggacucccacgcccac

SEQ ID NO: 39507 - RNA, 20 nt, Artificial Sequence
  GATA2 Guide RNA
ggcuucugagaguucuuuau

SEQ ID NO: 39508 - RNA, 20 nt, Artificial Sequence
  GATA2 Guide RNA
gggaaucaaagcaucucaga

SEQ ID NO: 39509 - RNA, 20 nt, Artificial Sequence
  GATA2 Guide RNA
gggacuggggguggagcgag

SEQ ID NO: 39510 - RNA, 20 nt, Artificial Sequence
  GATA2 Guide RNA
gggaggggggucgagguggg

SEQ ID NO: 39511 - RNA, 20 nt, Artificial Sequence
  GATA2 Guide RNA
gggagguagcuaauucuccu

SEQ ID NO: 39512 - RNA, 20 nt, Artificial Sequence
  GATA2 Guide RNA
gggauugcaagagcuacaga

SEQ ID NO: 39513 - RNA, 20 nt, Artificial Sequence
  GATA2 Guide RNA
gggcgugggaguccagccug

SEQ ID NO: 39514 - RNA, 20 nt, Artificial Sequence
  GATA2 Guide RNA
gggcuaaaucucacauggga

SEQ ID NO: 39515 - RNA, 20 nt, Artificial Sequence
  GATA2 Guide RNA
ggggacuggggguggagcga

SEQ ID NO: 39516 - RNA, 20 nt, Artificial Sequence
  GATA2 Guide RNA
ggggagguagcuaauucucc

SEQ ID NO: 39517 - RNA, 20 nt, Artificial Sequence
  GATA2 Guide RNA
gggggagguagcuaauucuc

SEQ ID NO: 39518 - RNA, 20 nt, Artificial Sequence
  GATA2 Guide RNA
ggggggucgaggugggcgug

SEQ ID NO: 39519 - RNA, 20 nt, Artificial Sequence
  GATA2 Guide RNA
gggggucgaggugggcgugg

SEQ ID NO: 39520 - RNA, 20 nt, Artificial Sequence
  GATA2 Guide RNA
ggggguggagcgagggucag

SEQ ID NO: 39521 - RNA, 20 nt, Artificial Sequence
  GATA2 Guide RNA
ggggucgaggugggcguggg

SEQ ID NO: 39522 - RNA, 20 nt, Artificial Sequence
  GATA2 Guide RNA
gggguggagcgagggucagg

SEQ ID NO: 39523 - RNA, 20 nt, Artificial Sequence
  GATA2 Guide RNA
ggguaguugggggagguagc

SEQ ID NO: 39524 - RNA, 20 nt, Artificial Sequence
  GATA2 Guide RNA
gggucagggaggggggucga

SEQ ID NO: 39525 - RNA, 20 nt, Artificial Sequence
  GATA2 Guide RNA
gggucgaggugggcguggga

SEQ ID NO: 39526 - RNA, 20 nt, Artificial Sequence
  GATA2 Guide RNA
ggguggagcgagggucaggg

SEQ ID NO: 39527 - RNA, 20 nt, Artificial Sequence
  GATA2 Guide RNA
gguagcuaauucuccucugu

SEQ ID NO: 39528 - RNA, 20 nt, Artificial Sequence
  GATA2 Guide RNA
gguaguugggggagguagcu

SEQ ID NO: 39529 - RNA, 20 nt, Artificial Sequence
  GATA2 Guide RNA
ggucagggaggggggucgag

SEQ ID NO: 39530 - RNA, 20 nt, Artificial Sequence
  GATA2 Guide RNA
ggucgaggugggcgugggag

SEQ ID NO: 39531 - RNA, 20 nt, Artificial Sequence
  GATA2 Guide RNA
gguggagcgagggucaggga

SEQ ID NO: 39532 - RNA, 20 nt, Artificial Sequence
  GATA2 Guide RNA
ggugggcgugggaguccagc

SEQ ID NO: 39533 - RNA, 20 nt, Artificial Sequence
  GATA2 Guide RNA
gguggggacuggggguggag

SEQ ID NO: 39534 - RNA, 20 nt, Artificial Sequence
  GATA2 Guide RNA
gguucugagaugcuuugauu

SEQ ID NO: 39535 - RNA, 20 nt, Artificial Sequence
  GATA2 Guide RNA
guagcuaauucuccucugua

SEQ ID NO: 39536 - RNA, 20 nt, Artificial Sequence
  GATA2 Guide RNA
guaguugggggagguagcua

SEQ ID NO: 39537 - RNA, 20 nt, Artificial Sequence
  GATA2 Guide RNA
gucaagacucacagaacuuu

SEQ ID NO: 39538 - RNA, 20 nt, Artificial Sequence
  GATA2 Guide RNA
gucaaggagggcuaaaucuc

SEQ ID NO: 39539 - RNA, 20 nt, Artificial Sequence
  GATA2 Guide RNA
gucagggaggggggucgagg

SEQ ID NO: 39540 - RNA, 20 nt, Artificial Sequence
  GATA2 Guide RNA
guccccaccagcucagucaa

SEQ ID NO: 39541 - RNA, 20 nt, Artificial Sequence
  GATA2 Guide RNA
gucgaggugggcgugggagu

SEQ ID NO: 39542 - RNA, 20 nt, Artificial Sequence
  GATA2 Guide RNA
gucuugacuuauuucguucu

SEQ ID NO: 39543 - RNA, 20 nt, Artificial Sequence
  GATA2 Guide RNA
gugagauuuagcccuccuug

SEQ ID NO: 39544 - RNA, 20 nt, Artificial Sequence
  GATA2 Guide RNA
gugagucuugacuuauuucg

SEQ ID NO: 39545 - RNA, 20 nt, Artificial Sequence
  GATA2 Guide RNA
guggagcgagggucagggag

SEQ ID NO: 39546 - RNA, 20 nt, Artificial Sequence
  GATA2 Guide RNA
gugggcgugggaguccagcc

SEQ ID NO: 39547 - RNA, 20 nt, Artificial Sequence
  GATA2 Guide RNA
guggggacuggggguggagc

SEQ ID NO: 39548 - RNA, 20 nt, Artificial Sequence
  GATA2 Guide RNA
guuagagcgcaggguaguug

SEQ ID NO: 39549 - RNA, 20 nt, Artificial Sequence
  GATA2 Guide RNA
guucugagaugcuuugauuc

SEQ ID NO: 39550 - RNA, 20 nt, Artificial Sequence
  GATA2 Guide RNA
guucugugagucuugacuua

SEQ ID NO: 39551 - RNA, 20 nt, Artificial Sequence
  GATA2 Guide RNA
guucuuuauuccaaaguucu

SEQ ID NO: 39552 - RNA, 20 nt, Artificial Sequence
  GATA2 Guide RNA
guugggggagguagcuaauu

SEQ ID NO: 39553 - RNA, 20 nt, Artificial Sequence
  GATA2 Guide RNA
uaaaauuccaugguucugag

SEQ ID NO: 39554 - RNA, 20 nt, Artificial Sequence
  GATA2 Guide RNA
uaaagaacucucagaagccu

SEQ ID NO: 39555 - RNA, 20 nt, Artificial Sequence
  GATA2 Guide RNA
uaaaucucacaugggaauca

SEQ ID NO: 39556 - RNA, 20 nt, Artificial Sequence
  GATA2 Guide RNA
uaacaucaggcuucugagag

SEQ ID NO: 39557 - RNA, 20 nt, Artificial Sequence
  GATA2 Guide RNA
uaagucaagacucacagaac

SEQ ID NO: 39558 - RNA, 20 nt, Artificial Sequence
  GATA2 Guide RNA
uaauucuccucuguagcucu

SEQ ID NO: 39559 - RNA, 20 nt, Artificial Sequence
  GATA2 Guide RNA
uacagaggagaauuagcuac

SEQ ID NO: 39560 - RNA, 20 nt, Artificial Sequence
  GATA2 Guide RNA
uacccugcgcucuaacucca

SEQ ID NO: 39561 - RNA, 20 nt, Artificial Sequence
  GATA2 Guide RNA
uaccucccccaacuacccug

SEQ ID NO: 39562 - RNA, 20 nt, Artificial Sequence
  GATA2 Guide RNA
uagagcgcaggguaguuggg

SEQ ID NO: 39563 - RNA, 20 nt, Artificial Sequence
  GATA2 Guide RNA
uagcccuccuugacugagcu

SEQ ID NO: 39564 - RNA, 20 nt, Artificial Sequence
  GATA2 Guide RNA
uagcuaauucuccucuguag

SEQ ID NO: 39565 - RNA, 20 nt, Artificial Sequence
  GATA2 Guide RNA
uagcuaccucccccaacuac

SEQ ID NO: 39566 - RNA, 20 nt, Artificial Sequence
  GATA2 Guide RNA
uaguugggggagguagcuaa

SEQ ID NO: 39567 - RNA, 20 nt, Artificial Sequence
  GATA2 Guide RNA
uauggaguuagagcgcaggg

SEQ ID NO: 39568 - RNA, 20 nt, Artificial Sequence
  GATA2 Guide RNA
uauuccaaaguucugugagu

SEQ ID NO: 39569 - RNA, 20 nt, Artificial Sequence
  GATA2 Guide RNA
ucaaagcaucucagaaccau

SEQ ID NO: 39570 - RNA, 20 nt, Artificial Sequence
  GATA2 Guide RNA
ucaacgggauugcaagagcu

SEQ ID NO: 39571 - RNA, 20 nt, Artificial Sequence
  GATA2 Guide RNA
ucaagacucacagaacuuug

SEQ ID NO: 39572 - RNA, 20 nt, Artificial Sequence
  GATA2 Guide RNA
ucaaggagggcuaaaucuca

SEQ ID NO: 39573 - RNA, 20 nt, Artificial Sequence
  GATA2 Guide RNA
ucacagaacuuuggaauaaa

SEQ ID NO: 39574 - RNA, 20 nt, Artificial Sequence
  GATA2 Guide RNA
ucacaugggaaucaaagcau

SEQ ID NO: 39575 - RNA, 20 nt, Artificial Sequence
  GATA2 Guide RNA
ucagaaccauggaauuuuag

SEQ ID NO: 39576 - RNA, 20 nt, Artificial Sequence
  GATA2 Guide RNA
ucagcaggcuggacucccac

SEQ ID NO: 39577 - RNA, 20 nt, Artificial Sequence
  GATA2 Guide RNA
ucaggcuucugagaguucuu

SEQ ID NO: 39578 - RNA, 20 nt, Artificial Sequence
  GATA2 Guide RNA
ucagggaggggggucgaggu

SEQ ID NO: 39579 - RNA, 20 nt, Artificial Sequence
  GATA2 Guide RNA
ucagucaaggagggcuaaau

SEQ ID NO: 39580 - RNA, 20 nt, Artificial Sequence
  GATA2 Guide RNA
uccaaaguucugugagucuu

SEQ ID NO: 39581 - RNA, 20 nt, Artificial Sequence
  GATA2 Guide RNA
uccacccccaguccccacca

SEQ ID NO: 39582 - RNA, 20 nt, Artificial Sequence
  GATA2 Guide RNA
uccaugguucugagaugcuu

SEQ ID NO: 39583 - RNA, 20 nt, Artificial Sequence
  GATA2 Guide RNA
ucccacgcccaccucgaccc

SEQ ID NO: 39584 - RNA, 20 nt, Artificial Sequence
  GATA2 Guide RNA
ucccaugugagauuuagccc

SEQ ID NO: 39585 - RNA, 20 nt, Artificial Sequence
  GATA2 Guide RNA
uccccaccagcucagucaag

SEQ ID NO: 39586 - RNA, 20 nt, Artificial Sequence
  GATA2 Guide RNA
uccccauuuauggaguuaga

SEQ ID NO: 39587 - RNA, 20 nt, Artificial Sequence
  GATA2 Guide RNA
ucccccaacuacccugcgcu

SEQ ID NO: 39588 - RNA, 20 nt, Artificial Sequence
  GATA2 Guide RNA
ucccugacccucgcuccacc

SEQ ID NO: 39589 - RNA, 20 nt, Artificial Sequence
  GATA2 Guide RNA
uccucuguagcucuugcaau

SEQ ID NO: 39590 - RNA, 20 nt, Artificial Sequence
  GATA2 Guide RNA
uccuugacugagcugguggg

SEQ ID NO: 39591 - RNA, 20 nt, Artificial Sequence
  GATA2 Guide RNA
ucgaccccccucccugaccc

SEQ ID NO: 39592 - RNA, 20 nt, Artificial Sequence
  GATA2 Guide RNA
ucgaggugggcgugggaguc

SEQ ID NO: 39593 - RNA, 20 nt, Artificial Sequence
  GATA2 Guide RNA
ucgcuccacccccagucccc

SEQ ID NO: 39594 - RNA, 20 nt, Artificial Sequence
  GATA2 Guide RNA
ucuaaaauuccaugguucug

SEQ ID NO: 39595 - RNA, 20 nt, Artificial Sequence
  GATA2 Guide RNA
ucuaacaucaggcuucugag

SEQ ID NO: 39596 - RNA, 20 nt, Artificial Sequence
  GATA2 Guide RNA
ucucacaugggaaucaaagc

SEQ ID NO: 39597 - RNA, 20 nt, Artificial Sequence
  GATA2 Guide RNA
ucucagaaccauggaauuuu

SEQ ID NO: 39598 - RNA, 20 nt, Artificial Sequence
  GATA2 Guide RNA
ucuccucuguagcucuugca

SEQ ID NO: 39599 - RNA, 20 nt, Artificial Sequence
  GATA2 Guide RNA
ucugagaguucuuuauucca

SEQ ID NO: 39600 - RNA, 20 nt, Artificial Sequence
  GATA2 Guide RNA
ucugagaugcuuugauuccc

SEQ ID NO: 39601 - RNA, 20 nt, Artificial Sequence
  GATA2 Guide RNA
ucuguagcucuugcaauccc

SEQ ID NO: 39602 - RNA, 20 nt, Artificial Sequence
  GATA2 Guide RNA
ucugugagucuugacuuauu

SEQ ID NO: 39603 - RNA, 20 nt, Artificial Sequence
  GATA2 Guide RNA
ucuugacuuauuucguucuc

SEQ ID NO: 39604 - RNA, 20 nt, Artificial Sequence
  GATA2 Guide RNA
ucuuuauuccaaaguucugu

SEQ ID NO: 39605 - RNA, 20 nt, Artificial Sequence
  GATA2 Guide RNA
ugacccucgcuccaccccca

SEQ ID NO: 39606 - RNA, 20 nt, Artificial Sequence
  GATA2 Guide RNA
ugacugagcugguggggacu

SEQ ID NO: 39607 - RNA, 20 nt, Artificial Sequence
  GATA2 Guide RNA
ugacuuauuucguucucaaa

SEQ ID NO: 39608 - RNA, 20 nt, Artificial Sequence
  GATA2 Guide RNA
ugagaacgaaauaagucaag

SEQ ID NO: 39609 - RNA, 20 nt, Artificial Sequence
  GATA2 Guide RNA
ugagaguucuuuauuccaaa

SEQ ID NO: 39610 - RNA, 20 nt, Artificial Sequence
  GATA2 Guide RNA
ugagaugcuuugauucccau

SEQ ID NO: 39611 - RNA, 20 nt, Artificial Sequence
  GATA2 Guide RNA
ugagauuuagcccuccuuga

SEQ ID NO: 39612 - RNA, 20 nt, Artificial Sequence
  GATA2 Guide RNA
ugagcugguggggacugggg

SEQ ID NO: 39613 - RNA, 20 nt, Artificial Sequence
  GATA2 Guide RNA
ugagucuugacuuauuucgu

SEQ ID NO: 39614 - RNA, 20 nt, Artificial Sequence
  GATA2 Guide RNA
ugauucccaugugagauuua

SEQ ID NO: 39615 - RNA, 20 nt, Artificial Sequence
  GATA2 Guide RNA
ugcaagagcuacagaggaga

SEQ ID NO: 39616 - RNA, 20 nt, Artificial Sequence
  GATA2 Guide RNA
ugcgcucuaacuccauaaau

SEQ ID NO: 39617 - RNA, 20 nt, Artificial Sequence
  GATA2 Guide RNA
ugcuuugauucccaugugag

SEQ ID NO: 39618 - RNA, 20 nt, Artificial Sequence
  GATA2 Guide RNA
uggaauaaagaacucucaga

SEQ ID NO: 39619 - RNA, 20 nt, Artificial Sequence
  GATA2 Guide RNA
uggacucccacgcccaccuc

SEQ ID NO: 39620 - RNA, 20 nt, Artificial Sequence
  GATA2 Guide RNA
uggagcgagggucagggagg

SEQ ID NO: 39621 - RNA, 20 nt, Artificial Sequence
  GATA2 Guide RNA
uggaguuagagcgcagggua

SEQ ID NO: 39622 - RNA, 20 nt, Artificial Sequence
  GATA2 Guide RNA
ugggaaucaaagcaucucag

SEQ ID NO: 39623 - RNA, 20 nt, Artificial Sequence
  GATA2 Guide RNA
ugggcgugggaguccagccu

SEQ ID NO: 39624 - RNA, 20 nt, Artificial Sequence
  GATA2 Guide RNA
uggggacuggggguggagcg

SEQ ID NO: 39625 - RNA, 20 nt, Artificial Sequence
  GATA2 Guide RNA
ugggggagguagcuaauucu

SEQ ID NO: 39626 - RNA, 20 nt, Artificial Sequence
  GATA2 Guide RNA
uggggguggagcgaggguca

SEQ ID NO: 39627 - RNA, 20 nt, Artificial Sequence
  GATA2 Guide RNA
ugguggggacugggggugga

SEQ ID NO: 39628 - RNA, 20 nt, Artificial Sequence
  GATA2 Guide RNA
ugguucugagaugcuuugau

SEQ ID NO: 39629 - RNA, 20 nt, Artificial Sequence
  GATA2 Guide RNA
ugugagauuuagcccuccuu

SEQ ID NO: 39630 - RNA, 20 nt, Artificial Sequence
  GATA2 Guide RNA
ugugagucuugacuuauuuc

SEQ ID NO: 39631 - RNA, 20 nt, Artificial Sequence
  GATA2 Guide RNA
uuagagcgcaggguaguugg

SEQ ID NO: 39632 - RNA, 20 nt, Artificial Sequence
  GATA2 Guide RNA
uuagcccuccuugacugagc

SEQ ID NO: 39633 - RNA, 20 nt, Artificial Sequence
  GATA2 Guide RNA
uuagcuaccucccccaacua

SEQ ID NO: 39634 - RNA, 20 nt, Artificial Sequence
  GATA2 Guide RNA
uuauggaguuagagcgcagg

SEQ ID NO: 39635 - RNA, 20 nt, Artificial Sequence
  GATA2 Guide RNA
uuauuccaaaguucugugag

SEQ ID NO: 39636 - RNA, 20 nt, Artificial Sequence
  GATA2 Guide RNA
uuccaaaguucugugagucu

SEQ ID NO: 39637 - RNA, 20 nt, Artificial Sequence
  GATA2 Guide RNA
uuccaugguucugagaugcu

SEQ ID NO: 39638 - RNA, 20 nt, Artificial Sequence
  GATA2 Guide RNA
uucccaugugagauuuagcc

SEQ ID NO: 39639 - RNA, 20 nt, Artificial Sequence
  GATA2 Guide RNA
uucuaaaauuccaugguucu

SEQ ID NO: 39640 - RNA, 20 nt, Artificial Sequence
  GATA2 Guide RNA
uucuaacaucaggcuucuga

SEQ ID NO: 39641 - RNA, 20 nt, Artificial Sequence
  GATA2 Guide RNA
uucuccucuguagcucuugc

SEQ ID NO: 39642 - RNA, 20 nt, Artificial Sequence
  GATA2 Guide RNA
uucugagaguucuuuauucc

SEQ ID NO: 39643 - RNA, 20 nt, Artificial Sequence
  GATA2 Guide RNA
uucugagaugcuuugauucc

SEQ ID NO: 39644 - RNA, 20 nt, Artificial Sequence
  GATA2 Guide RNA
uucugugagucuugacuuau

SEQ ID NO: 39645 - RNA, 20 nt, Artificial Sequence
  GATA2 Guide RNA
uucuuuauuccaaaguucug

SEQ ID NO: 39646 - RNA, 20 nt, Artificial Sequence
  GATA2 Guide RNA
uugacugagcugguggggac

SEQ ID NO: 39647 - RNA, 20 nt, Artificial Sequence
  GATA2 Guide RNA
uugacuuauuucguucucaa

SEQ ID NO: 39648 - RNA, 20 nt, Artificial Sequence
  GATA2 Guide RNA
uugagaacgaaauaagucaa

SEQ ID NO: 39649 - RNA, 20 nt, Artificial Sequence
  GATA2 Guide RNA
uugauucccaugugagauuu

SEQ ID NO: 39650 - RNA, 20 nt, Artificial Sequence
  GATA2 Guide RNA
uugcaagagcuacagaggag

SEQ ID NO: 39651 - RNA, 20 nt, Artificial Sequence
  GATA2 Guide RNA
uuggaauaaagaacucucag

SEQ ID NO: 39652 - RNA, 20 nt, Artificial Sequence
  GATA2 Guide RNA
uugggggagguagcuaauuc

SEQ ID NO: 39653 - RNA, 20 nt, Artificial Sequence
  GATA2 Guide RNA
uuuagcccuccuugacugag

SEQ ID NO: 39654 - RNA, 20 nt, Artificial Sequence
  GATA2 Guide RNA
uuuauggaguuagagcgcag

SEQ ID NO: 39655 - RNA, 20 nt, Artificial Sequence
  GATA2 Guide RNA
uuuauuccaaaguucuguga

SEQ ID NO: 39656 - RNA, 20 nt, Artificial Sequence
  GATA2 Guide RNA
uuugagaacgaaauaaguca

SEQ ID NO: 39657 - RNA, 20 nt, Artificial Sequence
  GATA2 Guide RNA
uuugauucccaugugagauu

SEQ ID NO: 39658 - RNA, 20 nt, Artificial Sequence
  GATA2 Guide RNA
uuuggaauaaagaacucuca

SEQ ID NO: 39659 - RNA, 21 nt, Artificial Sequence
  GATA2 Guide RNA
aaaauuccaugguucugagau

SEQ ID NO: 39660 - RNA, 21 nt, Artificial Sequence
  GATA2 Guide RNA
aaagaacucucagaagccuga

SEQ ID NO: 39661 - RNA, 21 nt, Artificial Sequence
  GATA2 Guide RNA
aaagcaucucagaaccaugga

SEQ ID NO: 39662 - RNA, 21 nt, Artificial Sequence
  GATA2 Guide RNA
aaaguucugugagucuugacu

SEQ ID NO: 39663 - RNA, 21 nt, Artificial Sequence
  GATA2 Guide RNA
aaauaagucaagacucacaga

SEQ ID NO: 39664 - RNA, 21 nt, Artificial Sequence
  GATA2 Guide RNA
aaaucucacaugggaaucaaa

SEQ ID NO: 39665 - RNA, 21 nt, Artificial Sequence
  GATA2 Guide RNA
aaauuccaugguucugagaug

SEQ ID NO: 39666 - RNA, 21 nt, Artificial Sequence
  GATA2 Guide RNA
aacaucaggcuucugagaguu

SEQ ID NO: 39667 - RNA, 21 nt, Artificial Sequence
  GATA2 Guide RNA
aacgaaauaagucaagacuca

SEQ ID NO: 39668 - RNA, 21 nt, Artificial Sequence
  GATA2 Guide RNA
aacgggauugcaagagcuaca

SEQ ID NO: 39669 - RNA, 21 nt, Artificial Sequence
  GATA2 Guide RNA
aacuacccugcgcucuaacuc

SEQ ID NO: 39670 - RNA, 21 nt, Artificial Sequence
  GATA2 Guide RNA
aacucucagaagccugauguu

SEQ ID NO: 39671 - RNA, 21 nt, Artificial Sequence
  GATA2 Guide RNA
aagaacucucagaagccugau

SEQ ID NO: 39672 - RNA, 21 nt, Artificial Sequence
  GATA2 Guide RNA
aagacucacagaacuuuggaa

SEQ ID NO: 39673 - RNA, 21 nt, Artificial Sequence
  GATA2 Guide RNA
aagagcuacagaggagaauua

SEQ ID NO: 39674 - RNA, 21 nt, Artificial Sequence
  GATA2 Guide RNA
aagcaucucagaaccauggaa

SEQ ID NO: 39675 - RNA, 21 nt, Artificial Sequence
  GATA2 Guide RNA
aaggagggcuaaaucucacau

SEQ ID NO: 39676 - RNA, 21 nt, Artificial Sequence
  GATA2 Guide RNA
aagucaagacucacagaacuu

SEQ ID NO: 39677 - RNA, 21 nt, Artificial Sequence
  GATA2 Guide RNA
aaguucugugagucuugacuu

SEQ ID NO: 39678 - RNA, 21 nt, Artificial Sequence
  GATA2 Guide RNA
aauaaagaacucucagaagcc

SEQ ID NO: 39679 - RNA, 21 nt, Artificial Sequence
  GATA2 Guide RNA
aauaagucaagacucacagaa

SEQ ID NO: 39680 - RNA, 21 nt, Artificial Sequence
  GATA2 Guide RNA
aaucaaagcaucucagaacca

SEQ ID NO: 39681 - RNA, 21 nt, Artificial Sequence
  GATA2 Guide RNA
aaucucacaugggaaucaaag

SEQ ID NO: 39682 - RNA, 21 nt, Artificial Sequence
  GATA2 Guide RNA
aauuagcuaccucccccaacu

SEQ ID NO: 39683 - RNA, 21 nt, Artificial Sequence
  GATA2 Guide RNA
aauuccaugguucugagaugc

SEQ ID NO: 39684 - RNA, 21 nt, Artificial Sequence
  GATA2 Guide RNA
aauucuccucuguagcucuug

SEQ ID NO: 39685 - RNA, 21 nt, Artificial Sequence
  GATA2 Guide RNA
acagaggagaauuagcuaccu

SEQ ID NO: 39686 - RNA, 21 nt, Artificial Sequence
  GATA2 Guide RNA
acaucaggcuucugagaguuc

SEQ ID NO: 39687 - RNA, 21 nt, Artificial Sequence
  GATA2 Guide RNA
acaugggaaucaaagcaucuc

SEQ ID NO: 39688 - RNA, 21 nt, Artificial Sequence
  GATA2 Guide RNA
accagcucagucaaggagggc

SEQ ID NO: 39689 - RNA, 21 nt, Artificial Sequence
  GATA2 Guide RNA
acccccaguccccaccagcuc

SEQ ID NO: 39690 - RNA, 21 nt, Artificial Sequence
  GATA2 Guide RNA
accccccucccugacccucgc

SEQ ID NO: 39691 - RNA, 21 nt, Artificial Sequence
  GATA2 Guide RNA
acccucgcuccacccccaguc

SEQ ID NO: 39692 - RNA, 21 nt, Artificial Sequence
  GATA2 Guide RNA
acccugcgcucuaacuccaua

SEQ ID NO: 39693 - RNA, 21 nt, Artificial Sequence
  GATA2 Guide RNA
accucccccaacuacccugcg

SEQ ID NO: 39694 - RNA, 21 nt, Artificial Sequence
  GATA2 Guide RNA
accucgaccccccucccugac

SEQ ID NO: 39695 - RNA, 21 nt, Artificial Sequence
  GATA2 Guide RNA
acgaaauaagucaagacucac

SEQ ID NO: 39696 - RNA, 21 nt, Artificial Sequence
  GATA2 Guide RNA
acgcccaccucgaccccccuc

SEQ ID NO: 39697 - RNA, 21 nt, Artificial Sequence
  GATA2 Guide RNA
acgggauugcaagagcuacag

SEQ ID NO: 39698 - RNA, 21 nt, Artificial Sequence
  GATA2 Guide RNA
acuacccugcgcucuaacucc

SEQ ID NO: 39699 - RNA, 21 nt, Artificial Sequence
  GATA2 Guide RNA
acucacagaacuuuggaauaa

SEQ ID NO: 39700 - RNA, 21 nt, Artificial Sequence
  GATA2 Guide RNA
acucccacgcccaccucgacc

SEQ ID NO: 39701 - RNA, 21 nt, Artificial Sequence
  GATA2 Guide RNA
acugagcugguggggacuggg

SEQ ID NO: 39702 - RNA, 21 nt, Artificial Sequence
  GATA2 Guide RNA
acuggggguggagcgaggguc

SEQ ID NO: 39703 - RNA, 21 nt, Artificial Sequence
  GATA2 Guide RNA
acuuuggaauaaagaacucuc

SEQ ID NO: 39704 - RNA, 21 nt, Artificial Sequence
  GATA2 Guide RNA
agaacgaaauaagucaagacu

SEQ ID NO: 39705 - RNA, 21 nt, Artificial Sequence
  GATA2 Guide RNA
agaacucucagaagccugaug

SEQ ID NO: 39706 - RNA, 21 nt, Artificial Sequence
  GATA2 Guide RNA
agaauuagcuaccucccccaa

SEQ ID NO: 39707 - RNA, 21 nt, Artificial Sequence
  GATA2 Guide RNA
agacucacagaacuuuggaau

SEQ ID NO: 39708 - RNA, 21 nt, Artificial Sequence
  GATA2 Guide RNA
agagcgcaggguaguuggggg

SEQ ID NO: 39709 - RNA, 21 nt, Artificial Sequence
  GATA2 Guide RNA
agagcuacagaggagaauuag

SEQ ID NO: 39710 - RNA, 21 nt, Artificial Sequence
  GATA2 Guide RNA
agaggagaauuagcuaccucc

SEQ ID NO: 39711 - RNA, 21 nt, Artificial Sequence
  GATA2 Guide RNA
agaugcuuugauucccaugug

SEQ ID NO: 39712 - RNA, 21 nt, Artificial Sequence
  GATA2 Guide RNA
agauuuagcccuccuugacug

SEQ ID NO: 39713 - RNA, 21 nt, Artificial Sequence
  GATA2 Guide RNA
agcaggcuggacucccacgcc

SEQ ID NO: 39714 - RNA, 21 nt, Artificial Sequence
  GATA2 Guide RNA
agcaucucagaaccauggaau

SEQ ID NO: 39715 - RNA, 21 nt, Artificial Sequence
  GATA2 Guide RNA
agcccuccuugacugagcugg

SEQ ID NO: 39716 - RNA, 21 nt, Artificial Sequence
  GATA2 Guide RNA
agcgagggucagggagggggg

SEQ ID NO: 39717 - RNA, 21 nt, Artificial Sequence
  GATA2 Guide RNA
agcgcaggguaguugggggag

SEQ ID NO: 39718 - RNA, 21 nt, Artificial Sequence
  GATA2 Guide RNA
agcuaauucuccucuguagcu

SEQ ID NO: 39719 - RNA, 21 nt, Artificial Sequence
  GATA2 Guide RNA
agcuacagaggagaauuagcu

SEQ ID NO: 39720 - RNA, 21 nt, Artificial Sequence
  GATA2 Guide RNA
agcuaccucccccaacuaccc

SEQ ID NO: 39721 - RNA, 21 nt, Artificial Sequence
  GATA2 Guide RNA
agcucagucaaggagggcuaa

SEQ ID NO: 39722 - RNA, 21 nt, Artificial Sequence
  GATA2 Guide RNA
agcugguggggacugggggug

SEQ ID NO: 39723 - RNA, 21 nt, Artificial Sequence
  GATA2 Guide RNA
aggagaauuagcuaccucccc

SEQ ID NO: 39724 - RNA, 21 nt, Artificial Sequence
  GATA2 Guide RNA
aggagggcuaaaucucacaug

SEQ ID NO: 39725 - RNA, 21 nt, Artificial Sequence
  GATA2 Guide RNA
aggcuggacucccacgcccac

SEQ ID NO: 39726 - RNA, 21 nt, Artificial Sequence
  GATA2 Guide RNA
aggcuucugagaguucuuuau

SEQ ID NO: 39727 - RNA, 21 nt, Artificial Sequence
  GATA2 Guide RNA
agggaggggggucgagguggg

SEQ ID NO: 39728 - RNA, 21 nt, Artificial Sequence
  GATA2 Guide RNA
agggcuaaaucucacauggga

SEQ ID NO: 39729 - RNA, 21 nt, Artificial Sequence
  GATA2 Guide RNA
aggggggucgaggugggcgug

SEQ ID NO: 39730 - RNA, 21 nt, Artificial Sequence
  GATA2 Guide RNA
aggguaguugggggagguagc

SEQ ID NO: 39731 - RNA, 21 nt, Artificial Sequence
  GATA2 Guide RNA
agggucagggaggggggucga

SEQ ID NO: 39732 - RNA, 21 nt, Artificial Sequence
  GATA2 Guide RNA
agguagcuaauucuccucugu

SEQ ID NO: 39733 - RNA, 21 nt, Artificial Sequence
  GATA2 Guide RNA
aggugggcgugggaguccagc

SEQ ID NO: 39734 - RNA, 21 nt, Artificial Sequence
  GATA2 Guide RNA
agucaagacucacagaacuuu

SEQ ID NO: 39735 - RNA, 21 nt, Artificial Sequence
  GATA2 Guide RNA
agucaaggagggcuaaaucuc

SEQ ID NO: 39736 - RNA, 21 nt, Artificial Sequence
  GATA2 Guide RNA
aguccccaccagcucagucaa

SEQ ID NO: 39737 - RNA, 21 nt, Artificial Sequence
  GATA2 Guide RNA
agucuugacuuauuucguucu

SEQ ID NO: 39738 - RNA, 21 nt, Artificial Sequence
  GATA2 Guide RNA
aguuagagcgcaggguaguug

SEQ ID NO: 39739 - RNA, 21 nt, Artificial Sequence
  GATA2 Guide RNA
aguucugugagucuugacuua

SEQ ID NO: 39740 - RNA, 21 nt, Artificial Sequence
  GATA2 Guide RNA
aguugggggagguagcuaauu

SEQ ID NO: 39741 - RNA, 21 nt, Artificial Sequence
  GATA2 Guide RNA
auaaagaacucucagaagccu

SEQ ID NO: 39742 - RNA, 21 nt, Artificial Sequence
  GATA2 Guide RNA
auaagucaagacucacagaac

SEQ ID NO: 39743 - RNA, 21 nt, Artificial Sequence
  GATA2 Guide RNA
aucaaagcaucucagaaccau

SEQ ID NO: 39744 - RNA, 21 nt, Artificial Sequence
  GATA2 Guide RNA
aucaggcuucugagaguucuu

SEQ ID NO: 39745 - RNA, 21 nt, Artificial Sequence
  GATA2 Guide RNA
aucucacaugggaaucaaagc

SEQ ID NO: 39746 - RNA, 21 nt, Artificial Sequence
  GATA2 Guide RNA
aucucagaaccauggaauuuu

SEQ ID NO: 39747 - RNA, 21 nt, Artificial Sequence
  GATA2 Guide RNA
augcuuugauucccaugugag

SEQ ID NO: 39748 - RNA, 21 nt, Artificial Sequence
  GATA2 Guide RNA
auggaguuagagcgcagggua

SEQ ID NO: 39749 - RNA, 21 nt, Artificial Sequence
  GATA2 Guide RNA
augggaaucaaagcaucucag

SEQ ID NO: 39750 - RNA, 21 nt, Artificial Sequence
  GATA2 Guide RNA
augguucugagaugcuuugau

SEQ ID NO: 39751 - RNA, 21 nt, Artificial Sequence
  GATA2 Guide RNA
augugagauuuagcccuccuu

SEQ ID NO: 39752 - RNA, 21 nt, Artificial Sequence
  GATA2 Guide RNA
auuagcuaccucccccaacua

SEQ ID NO: 39753 - RNA, 21 nt, Artificial Sequence
  GATA2 Guide RNA
auuccaaaguucugugagucu

SEQ ID NO: 39754 - RNA, 21 nt, Artificial Sequence
  GATA2 Guide RNA
auuccaugguucugagaugcu

SEQ ID NO: 39755 - RNA, 21 nt, Artificial Sequence
  GATA2 Guide RNA
auucccaugugagauuuagcc

SEQ ID NO: 39756 - RNA, 21 nt, Artificial Sequence
  GATA2 Guide RNA
auucuccucuguagcucuugc

SEQ ID NO: 39757 - RNA, 21 nt, Artificial Sequence
  GATA2 Guide RNA
auugcaagagcuacagaggag

SEQ ID NO: 39758 - RNA, 21 nt, Artificial Sequence
  GATA2 Guide RNA
auuuagcccuccuugacugag

SEQ ID NO: 39759 - RNA, 21 nt, Artificial Sequence
  GATA2 Guide RNA
auuuauggaguuagagcgcag

SEQ ID NO: 39760 - RNA, 21 nt, Artificial Sequence
  GATA2 Guide RNA
caaagcaucucagaaccaugg

SEQ ID NO: 39761 - RNA, 21 nt, Artificial Sequence
  GATA2 Guide RNA
caaaguucugugagucuugac

SEQ ID NO: 39762 - RNA, 21 nt, Artificial Sequence
  GATA2 Guide RNA
caacgggauugcaagagcuac

SEQ ID NO: 39763 - RNA, 21 nt, Artificial Sequence
  GATA2 Guide RNA
caacuacccugcgcucuaacu

SEQ ID NO: 39764 - RNA, 21 nt, Artificial Sequence
  GATA2 Guide RNA
caagacucacagaacuuugga

SEQ ID NO: 39765 - RNA, 21 nt, Artificial Sequence
  GATA2 Guide RNA
caagagcuacagaggagaauu

SEQ ID NO: 39766 - RNA, 21 nt, Artificial Sequence
  GATA2 Guide RNA
caaggagggcuaaaucucaca

SEQ ID NO: 39767 - RNA, 21 nt, Artificial Sequence
  GATA2 Guide RNA
cacagaacuuuggaauaaaga

SEQ ID NO: 39768 - RNA, 21 nt, Artificial Sequence
  GATA2 Guide RNA
cacaugggaaucaaagcaucu

SEQ ID NO: 39769 - RNA, 21 nt, Artificial Sequence
  GATA2 Guide RNA
caccagcucagucaaggaggg

SEQ ID NO: 39770 - RNA, 21 nt, Artificial Sequence
  GATA2 Guide RNA
cacccccaguccccaccagcu

SEQ ID NO: 39771 - RNA, 21 nt, Artificial Sequence
  GATA2 Guide RNA
caccucgaccccccucccuga

SEQ ID NO: 39772 - RNA, 21 nt, Artificial Sequence
  GATA2 Guide RNA
cacgcccaccucgaccccccu

SEQ ID NO: 39773 - RNA, 21 nt, Artificial Sequence
  GATA2 Guide RNA
cagaaccauggaauuuuagaa

SEQ ID NO: 39774 - RNA, 21 nt, Artificial Sequence
  GATA2 Guide RNA
cagaacuuuggaauaaagaac

SEQ ID NO: 39775 - RNA, 21 nt, Artificial Sequence
  GATA2 Guide RNA
cagaggagaauuagcuaccuc

SEQ ID NO: 39776 - RNA, 21 nt, Artificial Sequence
  GATA2 Guide RNA
cagcaggcuggacucccacgc

SEQ ID NO: 39777 - RNA, 21 nt, Artificial Sequence
  GATA2 Guide RNA
cagcucagucaaggagggcua

SEQ ID NO: 39778 - RNA, 21 nt, Artificial Sequence
  GATA2 Guide RNA
caggcuggacucccacgccca

SEQ ID NO: 39779 - RNA, 21 nt, Artificial Sequence
  GATA2 Guide RNA
caggcuucugagaguucuuua

SEQ ID NO: 39780 - RNA, 21 nt, Artificial Sequence
  GATA2 Guide RNA
cagggaggggggucgaggugg

SEQ ID NO: 39781 - RNA, 21 nt, Artificial Sequence
  GATA2 Guide RNA
caggguaguugggggagguag

SEQ ID NO: 39782 - RNA, 21 nt, Artificial Sequence
  GATA2 Guide RNA
cagucaaggagggcuaaaucu

SEQ ID NO: 39783 - RNA, 21 nt, Artificial Sequence
  GATA2 Guide RNA
caguccccaccagcucaguca

SEQ ID NO: 39784 - RNA, 21 nt, Artificial Sequence
  GATA2 Guide RNA
caucaggcuucugagaguucu

SEQ ID NO: 39785 - RNA, 21 nt, Artificial Sequence
  GATA2 Guide RNA
caucucagaaccauggaauuu

SEQ ID NO: 39786 - RNA, 21 nt, Artificial Sequence
  GATA2 Guide RNA
caugggaaucaaagcaucuca

SEQ ID NO: 39787 - RNA, 21 nt, Artificial Sequence
  GATA2 Guide RNA
caugguucugagaugcuuuga

SEQ ID NO: 39788 - RNA, 21 nt, Artificial Sequence
  GATA2 Guide RNA
caugugagauuuagcccuccu

SEQ ID NO: 39789 - RNA, 21 nt, Artificial Sequence
  GATA2 Guide RNA
cauuuauggaguuagagcgca

SEQ ID NO: 39790 - RNA, 21 nt, Artificial Sequence
  GATA2 Guide RNA
ccaaaguucugugagucuuga

SEQ ID NO: 39791 - RNA, 21 nt, Artificial Sequence
  GATA2 Guide RNA
ccaacuacccugcgcucuaac

SEQ ID NO: 39792 - RNA, 21 nt, Artificial Sequence
  GATA2 Guide RNA
ccaccagcucagucaaggagg

SEQ ID NO: 39793 - RNA, 21 nt, Artificial Sequence
  GATA2 Guide RNA
ccacccccaguccccaccagc

SEQ ID NO: 39794 - RNA, 21 nt, Artificial Sequence
  GATA2 Guide RNA
ccaccucgaccccccucccug

SEQ ID NO: 39795 - RNA, 21 nt, Artificial Sequence
  GATA2 Guide RNA
ccagcucagucaaggagggcu

SEQ ID NO: 39796 - RNA, 21 nt, Artificial Sequence
  GATA2 Guide RNA
ccaguccccaccagcucaguc

SEQ ID NO: 39797 - RNA, 21 nt, Artificial Sequence
  GATA2 Guide RNA
ccaugguucugagaugcuuug

SEQ ID NO: 39798 - RNA, 21 nt, Artificial Sequence
  GATA2 Guide RNA
ccaugugagauuuagcccucc

SEQ ID NO: 39799 - RNA, 21 nt, Artificial Sequence
  GATA2 Guide RNA
ccauuuauggaguuagagcgc

SEQ ID NO: 39800 - RNA, 21 nt, Artificial Sequence
  GATA2 Guide RNA
cccaacuacccugcgcucuaa

SEQ ID NO: 39801 - RNA, 21 nt, Artificial Sequence
  GATA2 Guide RNA
cccaccagcucagucaaggag

SEQ ID NO: 39802 - RNA, 21 nt, Artificial Sequence
  GATA2 Guide RNA
cccaccucgaccccccucccu

SEQ ID NO: 39803 - RNA, 21 nt, Artificial Sequence
  GATA2 Guide RNA
cccaguccccaccagcucagu

SEQ ID NO: 39804 - RNA, 21 nt, Artificial Sequence
  GATA2 Guide RNA
cccaugugagauuuagcccuc

SEQ ID NO: 39805 - RNA, 21 nt, Artificial Sequence
  GATA2 Guide RNA
cccauuuauggaguuagagcg

SEQ ID NO: 39806 - RNA, 21 nt, Artificial Sequence
  GATA2 Guide RNA
ccccaacuacccugcgcucua

SEQ ID NO: 39807 - RNA, 21 nt, Artificial Sequence
  GATA2 Guide RNA
ccccaccagcucagucaagga

SEQ ID NO: 39808 - RNA, 21 nt, Artificial Sequence
  GATA2 Guide RNA
ccccaguccccaccagcucag

SEQ ID NO: 39809 - RNA, 21 nt, Artificial Sequence
  GATA2 Guide RNA
ccccauuuauggaguuagagc

SEQ ID NO: 39810 - RNA, 21 nt, Artificial Sequence
  GATA2 Guide RNA
cccccaacuacccugcgcucu

SEQ ID NO: 39811 - RNA, 21 nt, Artificial Sequence
  GATA2 Guide RNA
cccccaguccccaccagcuca

SEQ ID NO: 39812 - RNA, 21 nt, Artificial Sequence
  GATA2 Guide RNA
ccccccucccugacccucgcu

SEQ ID NO: 39813 - RNA, 21 nt, Artificial Sequence
  GATA2 Guide RNA
cccccucccugacccucgcuc

SEQ ID NO: 39814 - RNA, 21 nt, Artificial Sequence
  GATA2 Guide RNA
ccccucccugacccucgcucc

SEQ ID NO: 39815 - RNA, 21 nt, Artificial Sequence
  GATA2 Guide RNA
cccucccugacccucgcucca

SEQ ID NO: 39816 - RNA, 21 nt, Artificial Sequence
  GATA2 Guide RNA
cccuccuugacugagcuggug

SEQ ID NO: 39817 - RNA, 21 nt, Artificial Sequence
  GATA2 Guide RNA
cccucgcuccacccccagucc

SEQ ID NO: 39818 - RNA, 21 nt, Artificial Sequence
  GATA2 Guide RNA
cccugacccucgcuccacccc

SEQ ID NO: 39819 - RNA, 21 nt, Artificial Sequence
  GATA2 Guide RNA
cccugcgcucuaacuccauaa

SEQ ID NO: 39820 - RNA, 21 nt, Artificial Sequence
  GATA2 Guide RNA
ccucccccaacuacccugcgc

SEQ ID NO: 39821 - RNA, 21 nt, Artificial Sequence
  GATA2 Guide RNA
ccucccugacccucgcuccac

SEQ ID NO: 39822 - RNA, 21 nt, Artificial Sequence
  GATA2 Guide RNA
ccuccuugacugagcuggugg

SEQ ID NO: 39823 - RNA, 21 nt, Artificial Sequence
  GATA2 Guide RNA
ccucgaccccccucccugacc

SEQ ID NO: 39824 - RNA, 21 nt, Artificial Sequence
  GATA2 Guide RNA
ccucgcuccacccccaguccc

SEQ ID NO: 39825 - RNA, 21 nt, Artificial Sequence
  GATA2 Guide RNA
ccucuguagcucuugcaaucc

SEQ ID NO: 39826 - RNA, 21 nt, Artificial Sequence
  GATA2 Guide RNA
ccugacccucgcuccaccccc

SEQ ID NO: 39827 - RNA, 21 nt, Artificial Sequence
  GATA2 Guide RNA
ccugcgcucuaacuccauaaa

SEQ ID NO: 39828 - RNA, 21 nt, Artificial Sequence
  GATA2 Guide RNA
ccuugacugagcuggugggga

SEQ ID NO: 39829 - RNA, 21 nt, Artificial Sequence
  GATA2 Guide RNA
cgaaauaagucaagacucaca

SEQ ID NO: 39830 - RNA, 21 nt, Artificial Sequence
  GATA2 Guide RNA
cgaccccccucccugacccuc

SEQ ID NO: 39831 - RNA, 21 nt, Artificial Sequence
  GATA2 Guide RNA
cgagggucagggagggggguc

SEQ ID NO: 39832 - RNA, 21 nt, Artificial Sequence
  GATA2 Guide RNA
cgaggugggcgugggagucca

SEQ ID NO: 39833 - RNA, 21 nt, Artificial Sequence
  GATA2 Guide RNA
cgcaggguaguugggggaggu

SEQ ID NO: 39834 - RNA, 21 nt, Artificial Sequence
  GATA2 Guide RNA
cgcuccacccccaguccccac

SEQ ID NO: 39835 - RNA, 21 nt, Artificial Sequence
  GATA2 Guide RNA
cgggauugcaagagcuacaga

SEQ ID NO: 39836 - RNA, 21 nt, Artificial Sequence
  GATA2 Guide RNA
cuaaaauuccaugguucugag

SEQ ID NO: 39837 - RNA, 21 nt, Artificial Sequence
  GATA2 Guide RNA
cuaaaucucacaugggaauca

SEQ ID NO: 39838 - RNA, 21 nt, Artificial Sequence
  GATA2 Guide RNA
cuaacaucaggcuucugagag

SEQ ID NO: 39839 - RNA, 21 nt, Artificial Sequence
  GATA2 Guide RNA
cuaauucuccucuguagcucu

SEQ ID NO: 39840 - RNA, 21 nt, Artificial Sequence
  GATA2 Guide RNA
cuacagaggagaauuagcuac

SEQ ID NO: 39841 - RNA, 21 nt, Artificial Sequence
  GATA2 Guide RNA
cuacccugcgcucuaacucca

SEQ ID NO: 39842 - RNA, 21 nt, Artificial Sequence
  GATA2 Guide RNA
cuaccucccccaacuacccug

SEQ ID NO: 39843 - RNA, 21 nt, Artificial Sequence
  GATA2 Guide RNA
cucacagaacuuuggaauaaa

SEQ ID NO: 39844 - RNA, 21 nt, Artificial Sequence
  GATA2 Guide RNA
cucacaugggaaucaaagcau

SEQ ID NO: 39845 - RNA, 21 nt, Artificial Sequence
  GATA2 Guide RNA
cucagaaccauggaauuuuag

SEQ ID NO: 39846 - RNA, 21 nt, Artificial Sequence
  GATA2 Guide RNA
cucagucaaggagggcuaaau

SEQ ID NO: 39847 - RNA, 21 nt, Artificial Sequence
  GATA2 Guide RNA
cuccacccccaguccccacca

SEQ ID NO: 39848 - RNA, 21 nt, Artificial Sequence
  GATA2 Guide RNA
cucccacgcccaccucgaccc

SEQ ID NO: 39849 - RNA, 21 nt, Artificial Sequence
  GATA2 Guide RNA
cucccccaacuacccugcgcu

SEQ ID NO: 39850 - RNA, 21 nt, Artificial Sequence
  GATA2 Guide RNA
cucccugacccucgcuccacc

SEQ ID NO: 39851 - RNA, 21 nt, Artificial Sequence
  GATA2 Guide RNA
cuccucuguagcucuugcaau

SEQ ID NO: 39852 - RNA, 21 nt, Artificial Sequence
  GATA2 Guide RNA
cuccuugacugagcugguggg

SEQ ID NO: 39853 - RNA, 21 nt, Artificial Sequence
  GATA2 Guide RNA
cucgaccccccucccugaccc

SEQ ID NO: 39854 - RNA, 21 nt, Artificial Sequence
  GATA2 Guide RNA
cucgcuccacccccagucccc

SEQ ID NO: 39855 - RNA, 21 nt, Artificial Sequence
  GATA2 Guide RNA
cucuguagcucuugcaauccc

SEQ ID NO: 39856 - RNA, 21 nt, Artificial Sequence
  GATA2 Guide RNA
cugacccucgcuccaccccca

SEQ ID NO: 39857 - RNA, 21 nt, Artificial Sequence
  GATA2 Guide RNA
cugagaguucuuuauuccaaa

SEQ ID NO: 39858 - RNA, 21 nt, Artificial Sequence
  GATA2 Guide RNA
cugagaugcuuugauucccau

SEQ ID NO: 39859 - RNA, 21 nt, Artificial Sequence
  GATA2 Guide RNA
cugagcugguggggacugggg

SEQ ID NO: 39860 - RNA, 21 nt, Artificial Sequence
  GATA2 Guide RNA
cugcgcucuaacuccauaaau

SEQ ID NO: 39861 - RNA, 21 nt, Artificial Sequence
  GATA2 Guide RNA
cuggacucccacgcccaccuc

SEQ ID NO: 39862 - RNA, 21 nt, Artificial Sequence
  GATA2 Guide RNA
cuggggguggagcgaggguca

SEQ ID NO: 39863 - RNA, 21 nt, Artificial Sequence
  GATA2 Guide RNA
cugguggggacugggggugga

SEQ ID NO: 39864 - RNA, 21 nt, Artificial Sequence
  GATA2 Guide RNA
cugugagucuugacuuauuuc

SEQ ID NO: 39865 - RNA, 21 nt, Artificial Sequence
  GATA2 Guide RNA
cuucugagaguucuuuauucc

SEQ ID NO: 39866 - RNA, 21 nt, Artificial Sequence
  GATA2 Guide RNA
cuugacugagcugguggggac

SEQ ID NO: 39867 - RNA, 21 nt, Artificial Sequence
  GATA2 Guide RNA
cuugacuuauuucguucucaa

SEQ ID NO: 39868 - RNA, 21 nt, Artificial Sequence
  GATA2 Guide RNA
cuuuauuccaaaguucuguga

SEQ ID NO: 39869 - RNA, 21 nt, Artificial Sequence
  GATA2 Guide RNA
cuuugauucccaugugagauu

SEQ ID NO: 39870 - RNA, 21 nt, Artificial Sequence
  GATA2 Guide RNA
cuuuggaauaaagaacucuca

SEQ ID NO: 39871 - RNA, 21 nt, Artificial Sequence
  GATA2 Guide RNA
gaaauaagucaagacucacag

SEQ ID NO: 39872 - RNA, 21 nt, Artificial Sequence
  GATA2 Guide RNA
gaacgaaauaagucaagacuc

SEQ ID NO: 39873 - RNA, 21 nt, Artificial Sequence
  GATA2 Guide RNA
gaacucucagaagccugaugu

SEQ ID NO: 39874 - RNA, 21 nt, Artificial Sequence
  GATA2 Guide RNA
gaacuuuggaauaaagaacuc

SEQ ID NO: 39875 - RNA, 21 nt, Artificial Sequence
  GATA2 Guide RNA
gaauaaagaacucucagaagc

SEQ ID NO: 39876 - RNA, 21 nt, Artificial Sequence
  GATA2 Guide RNA
gaaucaaagcaucucagaacc

SEQ ID NO: 39877 - RNA, 21 nt, Artificial Sequence
  GATA2 Guide RNA
gaauuagcuaccucccccaac

SEQ ID NO: 39878 - RNA, 21 nt, Artificial Sequence
  GATA2 Guide RNA
gaccccccucccugacccucg

SEQ ID NO: 39879 - RNA, 21 nt, Artificial Sequence
  GATA2 Guide RNA
gacccucgcuccacccccagu

SEQ ID NO: 39880 - RNA, 21 nt, Artificial Sequence
  GATA2 Guide RNA
gacucacagaacuuuggaaua

SEQ ID NO: 39881 - RNA, 21 nt, Artificial Sequence
  GATA2 Guide RNA
gacucccacgcccaccucgac

SEQ ID NO: 39882 - RNA, 21 nt, Artificial Sequence
  GATA2 Guide RNA
gacugagcugguggggacugg

SEQ ID NO: 39883 - RNA, 21 nt, Artificial Sequence
  GATA2 Guide RNA
gacuggggguggagcgagggu

SEQ ID NO: 39884 - RNA, 21 nt, Artificial Sequence
  GATA2 Guide RNA
gagaacgaaauaagucaagac

SEQ ID NO: 39885 - RNA, 21 nt, Artificial Sequence
  GATA2 Guide RNA
gagaauuagcuaccuccccca

SEQ ID NO: 39886 - RNA, 21 nt, Artificial Sequence
  GATA2 Guide RNA
gagaguucuuuauuccaaagu

SEQ ID NO: 39887 - RNA, 21 nt, Artificial Sequence
  GATA2 Guide RNA
gagaugcuuugauucccaugu

SEQ ID NO: 39888 - RNA, 21 nt, Artificial Sequence
  GATA2 Guide RNA
gagauuuagcccuccuugacu

SEQ ID NO: 39889 - RNA, 21 nt, Artificial Sequence
  GATA2 Guide RNA
gagcgagggucagggaggggg

SEQ ID NO: 39890 - RNA, 21 nt, Artificial Sequence
  GATA2 Guide RNA
gagcgcaggguaguuggggga

SEQ ID NO: 39891 - RNA, 21 nt, Artificial Sequence
  GATA2 Guide RNA
gagcuacagaggagaauuagc

SEQ ID NO: 39892 - RNA, 21 nt, Artificial Sequence
  GATA2 Guide RNA
gagcugguggggacugggggu

SEQ ID NO: 39893 - RNA, 21 nt, Artificial Sequence
  GATA2 Guide RNA
gaggagaauuagcuaccuccc

SEQ ID NO: 39894 - RNA, 21 nt, Artificial Sequence
  GATA2 Guide RNA
gagggcuaaaucucacauggg

SEQ ID NO: 39895 - RNA, 21 nt, Artificial Sequence
  GATA2 Guide RNA
gaggggggucgaggugggcgu

SEQ ID NO: 39896 - RNA, 21 nt, Artificial Sequence
  GATA2 Guide RNA
gagggucagggaggggggucg

SEQ ID NO: 39897 - RNA, 21 nt, Artificial Sequence
  GATA2 Guide RNA
gagguagcuaauucuccucug

SEQ ID NO: 39898 - RNA, 21 nt, Artificial Sequence
  GATA2 Guide RNA
gaggugggcgugggaguccag

SEQ ID NO: 39899 - RNA, 21 nt, Artificial Sequence
  GATA2 Guide RNA
gagucuugacuuauuucguuc

SEQ ID NO: 39900 - RNA, 21 nt, Artificial Sequence
  GATA2 Guide RNA
gaguuagagcgcaggguaguu

SEQ ID NO: 39901 - RNA, 21 nt, Artificial Sequence
  GATA2 Guide RNA
gaguucuuuauuccaaaguuc

SEQ ID NO: 39902 - RNA, 21 nt, Artificial Sequence
  GATA2 Guide RNA
gaugcuuugauucccauguga

SEQ ID NO: 39903 - RNA, 21 nt, Artificial Sequence
  GATA2 Guide RNA
gauucccaugugagauuuagc

SEQ ID NO: 39904 - RNA, 21 nt, Artificial Sequence
  GATA2 Guide RNA
gauugcaagagcuacagagga

SEQ ID NO: 39905 - RNA, 21 nt, Artificial Sequence
  GATA2 Guide RNA
gauuuagcccuccuugacuga

SEQ ID NO: 39906 - RNA, 21 nt, Artificial Sequence
  GATA2 Guide RNA
gcaagagcuacagaggagaau

SEQ ID NO: 39907 - RNA, 21 nt, Artificial Sequence
  GATA2 Guide RNA
gcaggcuggacucccacgccc

SEQ ID NO: 39908 - RNA, 21 nt, Artificial Sequence
  GATA2 Guide RNA
gcaggguaguugggggaggua

SEQ ID NO: 39909 - RNA, 21 nt, Artificial Sequence
  GATA2 Guide RNA
gcaucucagaaccauggaauu

SEQ ID NO: 39910 - RNA, 21 nt, Artificial Sequence
  GATA2 Guide RNA
gcccuccuugacugagcuggu

SEQ ID NO: 39911 - RNA, 21 nt, Artificial Sequence
  GATA2 Guide RNA
gcgagggucagggaggggggu

SEQ ID NO: 39912 - RNA, 21 nt, Artificial Sequence
  GATA2 Guide RNA
gcgcaggguaguugggggagg

SEQ ID NO: 39913 - RNA, 21 nt, Artificial Sequence
  GATA2 Guide RNA
gcuaaaucucacaugggaauc

SEQ ID NO: 39914 - RNA, 21 nt, Artificial Sequence
  GATA2 Guide RNA
gcuaauucuccucuguagcuc

SEQ ID NO: 39915 - RNA, 21 nt, Artificial Sequence
  GATA2 Guide RNA
gcuacagaggagaauuagcua

SEQ ID NO: 39916 - RNA, 21 nt, Artificial Sequence
  GATA2 Guide RNA
gcuaccucccccaacuacccu

SEQ ID NO: 39917 - RNA, 21 nt, Artificial Sequence
  GATA2 Guide RNA
gcucagucaaggagggcuaaa

SEQ ID NO: 39918 - RNA, 21 nt, Artificial Sequence
  GATA2 Guide RNA
gcuccacccccaguccccacc

SEQ ID NO: 39919 - RNA, 21 nt, Artificial Sequence
  GATA2 Guide RNA
gcuggacucccacgcccaccu

SEQ ID NO: 39920 - RNA, 21 nt, Artificial Sequence
  GATA2 Guide RNA
gcugguggggacugggggugg

SEQ ID NO: 39921 - RNA, 21 nt, Artificial Sequence
  GATA2 Guide RNA
gcuucugagaguucuuuauuc

SEQ ID NO: 39922 - RNA, 21 nt, Artificial Sequence
  GATA2 Guide RNA
gcuuugauucccaugugagau

SEQ ID NO: 39923 - RNA, 21 nt, Artificial Sequence
  GATA2 Guide RNA
ggaauaaagaacucucagaag

SEQ ID NO: 39924 - RNA, 21 nt, Artificial Sequence
  GATA2 Guide RNA
ggaaucaaagcaucucagaac

SEQ ID NO: 39925 - RNA, 21 nt, Artificial Sequence
  GATA2 Guide RNA
ggacucccacgcccaccucga

SEQ ID NO: 39926 - RNA, 21 nt, Artificial Sequence
  GATA2 Guide RNA
ggacuggggguggagcgaggg

SEQ ID NO: 39927 - RNA, 21 nt, Artificial Sequence
  GATA2 Guide RNA
ggagaauuagcuaccuccccc

SEQ ID NO: 39928 - RNA, 21 nt, Artificial Sequence
  GATA2 Guide RNA
ggagcgagggucagggagggg

SEQ ID NO: 39929 - RNA, 21 nt, Artificial Sequence
  GATA2 Guide RNA
ggagggcuaaaucucacaugg

SEQ ID NO: 39930 - RNA, 21 nt, Artificial Sequence
  GATA2 Guide RNA
ggagguagcuaauucuccucu

SEQ ID NO: 39931 - RNA, 21 nt, Artificial Sequence
  GATA2 Guide RNA
ggaguuagagcgcaggguagu

SEQ ID NO: 39932 - RNA, 21 nt, Artificial Sequence
  GATA2 Guide RNA
ggauugcaagagcuacagagg

SEQ ID NO: 39933 - RNA, 21 nt, Artificial Sequence
  GATA2 Guide RNA
ggcuaaaucucacaugggaau

SEQ ID NO: 39934 - RNA, 21 nt, Artificial Sequence
  GATA2 Guide RNA
ggcuggacucccacgcccacc

SEQ ID NO: 39935 - RNA, 21 nt, Artificial Sequence
  GATA2 Guide RNA
ggcuucugagaguucuuuauu

SEQ ID NO: 39936 - RNA, 21 nt, Artificial Sequence
  GATA2 Guide RNA
gggaaucaaagcaucucagaa

SEQ ID NO: 39937 - RNA, 21 nt, Artificial Sequence
  GATA2 Guide RNA
gggacuggggguggagcgagg

SEQ ID NO: 39938 - RNA, 21 nt, Artificial Sequence
  GATA2 Guide RNA
gggagguagcuaauucuccuc

SEQ ID NO: 39939 - RNA, 21 nt, Artificial Sequence
  GATA2 Guide RNA
gggauugcaagagcuacagag

SEQ ID NO: 39940 - RNA, 21 nt, Artificial Sequence
  GATA2 Guide RNA
gggcuaaaucucacaugggaa

SEQ ID NO: 39941 - RNA, 21 nt, Artificial Sequence
  GATA2 Guide RNA
ggggacuggggguggagcgag

SEQ ID NO: 39942 - RNA, 21 nt, Artificial Sequence
  GATA2 Guide RNA
ggggagguagcuaauucuccu

SEQ ID NO: 39943 - RNA, 21 nt, Artificial Sequence
  GATA2 Guide RNA
gggggagguagcuaauucucc

SEQ ID NO: 39944 - RNA, 21 nt, Artificial Sequence
  GATA2 Guide RNA
ggggguggagcgagggucagg

SEQ ID NO: 39945 - RNA, 21 nt, Artificial Sequence
  GATA2 Guide RNA
ggggucgaggugggcguggga

SEQ ID NO: 39946 - RNA, 21 nt, Artificial Sequence
  GATA2 Guide RNA
gggguggagcgagggucaggg

SEQ ID NO: 39947 - RNA, 21 nt, Artificial Sequence
  GATA2 Guide RNA
ggguaguugggggagguagcu

SEQ ID NO: 39948 - RNA, 21 nt, Artificial Sequence
  GATA2 Guide RNA
gggucagggaggggggucgag

SEQ ID NO: 39949 - RNA, 21 nt, Artificial Sequence
  GATA2 Guide RNA
gggucgaggugggcgugggag

SEQ ID NO: 39950 - RNA, 21 nt, Artificial Sequence
  GATA2 Guide RNA
ggguggagcgagggucaggga

SEQ ID NO: 39951 - RNA, 21 nt, Artificial Sequence
  GATA2 Guide RNA
gguagcuaauucuccucugua

SEQ ID NO: 39952 - RNA, 21 nt, Artificial Sequence
  GATA2 Guide RNA
gguaguugggggagguagcua

SEQ ID NO: 39953 - RNA, 21 nt, Artificial Sequence
  GATA2 Guide RNA
ggucagggaggggggucgagg

SEQ ID NO: 39954 - RNA, 21 nt, Artificial Sequence
  GATA2 Guide RNA
ggucgaggugggcgugggagu

SEQ ID NO: 39955 - RNA, 21 nt, Artificial Sequence
  GATA2 Guide RNA
gguggagcgagggucagggag

SEQ ID NO: 39956 - RNA, 21 nt, Artificial Sequence
  GATA2 Guide RNA
ggugggcgugggaguccagcc

SEQ ID NO: 39957 - RNA, 21 nt, Artificial Sequence
  GATA2 Guide RNA
gguggggacuggggguggagc

SEQ ID NO: 39958 - RNA, 21 nt, Artificial Sequence
  GATA2 Guide RNA
gguucugagaugcuuugauuc

SEQ ID NO: 39959 - RNA, 21 nt, Artificial Sequence
  GATA2 Guide RNA
guagcuaauucuccucuguag

SEQ ID NO: 39960 - RNA, 21 nt, Artificial Sequence
  GATA2 Guide RNA
guaguugggggagguagcuaa

SEQ ID NO: 39961 - RNA, 21 nt, Artificial Sequence
  GATA2 Guide RNA
gucaagacucacagaacuuug

SEQ ID NO: 39962 - RNA, 21 nt, Artificial Sequence
  GATA2 Guide RNA
gucaaggagggcuaaaucuca

SEQ ID NO: 39963 - RNA, 21 nt, Artificial Sequence
  GATA2 Guide RNA
gucagggaggggggucgaggu

SEQ ID NO: 39964 - RNA, 21 nt, Artificial Sequence
  GATA2 Guide RNA
guccccaccagcucagucaag

SEQ ID NO: 39965 - RNA, 21 nt, Artificial Sequence
  GATA2 Guide RNA
gucgaggugggcgugggaguc

SEQ ID NO: 39966 - RNA, 21 nt, Artificial Sequence
  GATA2 Guide RNA
gucuugacuuauuucguucuc

SEQ ID NO: 39967 - RNA, 21 nt, Artificial Sequence
  GATA2 Guide RNA
gugagauuuagcccuccuuga

SEQ ID NO: 39968 - RNA, 21 nt, Artificial Sequence
  GATA2 Guide RNA
gugagucuugacuuauuucgu

SEQ ID NO: 39969 - RNA, 21 nt, Artificial Sequence
  GATA2 Guide RNA
guggagcgagggucagggagg

SEQ ID NO: 39970 - RNA, 21 nt, Artificial Sequence
  GATA2 Guide RNA
gugggcgugggaguccagccu

SEQ ID NO: 39971 - RNA, 21 nt, Artificial Sequence
  GATA2 Guide RNA
guggggacuggggguggagcg

SEQ ID NO: 39972 - RNA, 21 nt, Artificial Sequence
  GATA2 Guide RNA
guuagagcgcaggguaguugg

SEQ ID NO: 39973 - RNA, 21 nt, Artificial Sequence
  GATA2 Guide RNA
guucugagaugcuuugauucc

SEQ ID NO: 39974 - RNA, 21 nt, Artificial Sequence
  GATA2 Guide RNA
guucugugagucuugacuuau

SEQ ID NO: 39975 - RNA, 21 nt, Artificial Sequence
  GATA2 Guide RNA
guucuuuauuccaaaguucug

SEQ ID NO: 39976 - RNA, 21 nt, Artificial Sequence
  GATA2 Guide RNA
guugggggagguagcuaauuc

SEQ ID NO: 39977 - RNA, 21 nt, Artificial Sequence
  GATA2 Guide RNA
uaaaauuccaugguucugaga

SEQ ID NO: 39978 - RNA, 21 nt, Artificial Sequence
  GATA2 Guide RNA
uaaagaacucucagaagccug

SEQ ID NO: 39979 - RNA, 21 nt, Artificial Sequence
  GATA2 Guide RNA
uaaaucucacaugggaaucaa

SEQ ID NO: 39980 - RNA, 21 nt, Artificial Sequence
  GATA2 Guide RNA
uaacaucaggcuucugagagu

SEQ ID NO: 39981 - RNA, 21 nt, Artificial Sequence
  GATA2 Guide RNA
uaagucaagacucacagaacu

SEQ ID NO: 39982 - RNA, 21 nt, Artificial Sequence
  GATA2 Guide RNA
uaauucuccucuguagcucuu

SEQ ID NO: 39983 - RNA, 21 nt, Artificial Sequence
  GATA2 Guide RNA
uacagaggagaauuagcuacc

SEQ ID NO: 39984 - RNA, 21 nt, Artificial Sequence
  GATA2 Guide RNA
uacccugcgcucuaacuccau

SEQ ID NO: 39985 - RNA, 21 nt, Artificial Sequence
  GATA2 Guide RNA
uaccucccccaacuacccugc

SEQ ID NO: 39986 - RNA, 21 nt, Artificial Sequence
  GATA2 Guide RNA
uagagcgcaggguaguugggg

SEQ ID NO: 39987 - RNA, 21 nt, Artificial Sequence
  GATA2 Guide RNA
uagcccuccuugacugagcug

SEQ ID NO: 39988 - RNA, 21 nt, Artificial Sequence
  GATA2 Guide RNA
uagcuaauucuccucuguagc

SEQ ID NO: 39989 - RNA, 21 nt, Artificial Sequence
  GATA2 Guide RNA
uagcuaccucccccaacuacc

SEQ ID NO: 39990 - RNA, 21 nt, Artificial Sequence
  GATA2 Guide RNA
uaguugggggagguagcuaau

SEQ ID NO: 39991 - RNA, 21 nt, Artificial Sequence
  GATA2 Guide RNA
uauggaguuagagcgcagggu

SEQ ID NO: 39992 - RNA, 21 nt, Artificial Sequence
  GATA2 Guide RNA
uauuccaaaguucugugaguc

SEQ ID NO: 39993 - RNA, 21 nt, Artificial Sequence
  GATA2 Guide RNA
ucaaagcaucucagaaccaug

SEQ ID NO: 39994 - RNA, 21 nt, Artificial Sequence
  GATA2 Guide RNA
ucaacgggauugcaagagcua

SEQ ID NO: 39995 - RNA, 21 nt, Artificial Sequence
  GATA2 Guide RNA
ucaagacucacagaacuuugg

SEQ ID NO: 39996 - RNA, 21 nt, Artificial Sequence
  GATA2 Guide RNA
ucaaggagggcuaaaucucac

SEQ ID NO: 39997 - RNA, 21 nt, Artificial Sequence
  GATA2 Guide RNA
ucacagaacuuuggaauaaag

SEQ ID NO: 39998 - RNA, 21 nt, Artificial Sequence
  GATA2 Guide RNA
ucacaugggaaucaaagcauc

SEQ ID NO: 39999 - RNA, 21 nt, Artificial Sequence
  GATA2 Guide RNA
ucagaaccauggaauuuuaga

SEQ ID NO: 40000 - RNA, 21 nt, Artificial Sequence
  GATA2 Guide RNA
ucagcaggcuggacucccacg

SEQ ID NO: 40001 - RNA, 21 nt, Artificial Sequence
  GATA2 Guide RNA
ucaggcuucugagaguucuuu

SEQ ID NO: 40002 - RNA, 21 nt, Artificial Sequence
  GATA2 Guide RNA
ucagggaggggggucgaggug

SEQ ID NO: 40003 - RNA, 21 nt, Artificial Sequence
  GATA2 Guide RNA
ucagucaaggagggcuaaauc

SEQ ID NO: 40004 - RNA, 21 nt, Artificial Sequence
  GATA2 Guide RNA
uccaaaguucugugagucuug

SEQ ID NO: 40005 - RNA, 21 nt, Artificial Sequence
  GATA2 Guide RNA
uccacccccaguccccaccag

SEQ ID NO: 40006 - RNA, 21 nt, Artificial Sequence
  GATA2 Guide RNA
uccaugguucugagaugcuuu

SEQ ID NO: 40007 - RNA, 21 nt, Artificial Sequence
  GATA2 Guide RNA
ucccacgcccaccucgacccc

SEQ ID NO: 40008 - RNA, 21 nt, Artificial Sequence
  GATA2 Guide RNA
ucccaugugagauuuagcccu

SEQ ID NO: 40009 - RNA, 21 nt, Artificial Sequence
  GATA2 Guide RNA
uccccaccagcucagucaagg

SEQ ID NO: 40010 - RNA, 21 nt, Artificial Sequence
  GATA2 Guide RNA
uccccauuuauggaguuagag

SEQ ID NO: 40011 - RNA, 21 nt, Artificial Sequence
  GATA2 Guide RNA
ucccccaacuacccugcgcuc

SEQ ID NO: 40012 - RNA, 21 nt, Artificial Sequence
  GATA2 Guide RNA
ucccugacccucgcuccaccc

SEQ ID NO: 40013 - RNA, 21 nt, Artificial Sequence
  GATA2 Guide RNA
uccucuguagcucuugcaauc

SEQ ID NO: 40014 - RNA, 21 nt, Artificial Sequence
  GATA2 Guide RNA
uccuugacugagcuggugggg

SEQ ID NO: 40015 - RNA, 21 nt, Artificial Sequence
  GATA2 Guide RNA
ucgaccccccucccugacccu

SEQ ID NO: 40016 - RNA, 21 nt, Artificial Sequence
  GATA2 Guide RNA
ucgaggugggcgugggagucc

SEQ ID NO: 40017 - RNA, 21 nt, Artificial Sequence
  GATA2 Guide RNA
ucgcuccacccccagucccca

SEQ ID NO: 40018 - RNA, 21 nt, Artificial Sequence
  GATA2 Guide RNA
ucuaaaauuccaugguucuga

SEQ ID NO: 40019 - RNA, 21 nt, Artificial Sequence
  GATA2 Guide RNA
ucuaacaucaggcuucugaga

SEQ ID NO: 40020 - RNA, 21 nt, Artificial Sequence
  GATA2 Guide RNA
ucucacaugggaaucaaagca

SEQ ID NO: 40021 - RNA, 21 nt, Artificial Sequence
  GATA2 Guide RNA
ucucagaaccauggaauuuua

SEQ ID NO: 40022 - RNA, 21 nt, Artificial Sequence
  GATA2 Guide RNA
ucuccucuguagcucuugcaa

SEQ ID NO: 40023 - RNA, 21 nt, Artificial Sequence
  GATA2 Guide RNA
ucugagaguucuuuauuccaa

SEQ ID NO: 40024 - RNA, 21 nt, Artificial Sequence
  GATA2 Guide RNA
ucugagaugcuuugauuccca

SEQ ID NO: 40025 - RNA, 21 nt, Artificial Sequence
  GATA2 Guide RNA
ucuguagcucuugcaaucccg

SEQ ID NO: 40026 - RNA, 21 nt, Artificial Sequence
  GATA2 Guide RNA
ucugugagucuugacuuauuu

SEQ ID NO: 40027 - RNA, 21 nt, Artificial Sequence
  GATA2 Guide RNA
ucuugacuuauuucguucuca

SEQ ID NO: 40028 - RNA, 21 nt, Artificial Sequence
  GATA2 Guide RNA
ucuuuauuccaaaguucugug

SEQ ID NO: 40029 - RNA, 21 nt, Artificial Sequence
  GATA2 Guide RNA
ugacccucgcuccacccccag

SEQ ID NO: 40030 - RNA, 21 nt, Artificial Sequence
  GATA2 Guide RNA
ugacugagcugguggggacug

SEQ ID NO: 40031 - RNA, 21 nt, Artificial Sequence
  GATA2 Guide RNA
ugagaacgaaauaagucaaga

SEQ ID NO: 40032 - RNA, 21 nt, Artificial Sequence
  GATA2 Guide RNA
ugagaguucuuuauuccaaag

SEQ ID NO: 40033 - RNA, 21 nt, Artificial Sequence
  GATA2 Guide RNA
ugagaugcuuugauucccaug

SEQ ID NO: 40034 - RNA, 21 nt, Artificial Sequence
  GATA2 Guide RNA
ugagauuuagcccuccuugac

SEQ ID NO: 40035 - RNA, 21 nt, Artificial Sequence
  GATA2 Guide RNA
ugagcugguggggacuggggg

SEQ ID NO: 40036 - RNA, 21 nt, Artificial Sequence
  GATA2 Guide RNA
ugagucuugacuuauuucguu

SEQ ID NO: 40037 - RNA, 21 nt, Artificial Sequence
  GATA2 Guide RNA
ugauucccaugugagauuuag

SEQ ID NO: 40038 - RNA, 21 nt, Artificial Sequence
  GATA2 Guide RNA
ugcaagagcuacagaggagaa

SEQ ID NO: 40039 - RNA, 21 nt, Artificial Sequence
  GATA2 Guide RNA
ugcgcucuaacuccauaaaug

SEQ ID NO: 40040 - RNA, 21 nt, Artificial Sequence
  GATA2 Guide RNA
ugcuuugauucccaugugaga

SEQ ID NO: 40041 - RNA, 21 nt, Artificial Sequence
  GATA2 Guide RNA
uggaauaaagaacucucagaa

SEQ ID NO: 40042 - RNA, 21 nt, Artificial Sequence
  GATA2 Guide RNA
uggacucccacgcccaccucg

SEQ ID NO: 40043 - RNA, 21 nt, Artificial Sequence
  GATA2 Guide RNA
uggagcgagggucagggaggg

SEQ ID NO: 40044 - RNA, 21 nt, Artificial Sequence
  GATA2 Guide RNA
uggaguuagagcgcaggguag

SEQ ID NO: 40045 - RNA, 21 nt, Artificial Sequence
  GATA2 Guide RNA
ugggaaucaaagcaucucaga

SEQ ID NO: 40046 - RNA, 21 nt, Artificial Sequence
  GATA2 Guide RNA
ugggcgugggaguccagccug

SEQ ID NO: 40047 - RNA, 21 nt, Artificial Sequence
  GATA2 Guide RNA
uggggacuggggguggagcga

SEQ ID NO: 40048 - RNA, 21 nt, Artificial Sequence
  GATA2 Guide RNA
ugggggagguagcuaauucuc

SEQ ID NO: 40049 - RNA, 21 nt, Artificial Sequence
  GATA2 Guide RNA
uggggguggagcgagggucag

SEQ ID NO: 40050 - RNA, 21 nt, Artificial Sequence
  GATA2 Guide RNA
ugguggggacuggggguggag

SEQ ID NO: 40051 - RNA, 21 nt, Artificial Sequence
  GATA2 Guide RNA
ugguucugagaugcuuugauu

SEQ ID NO: 40052 - RNA, 21 nt, Artificial Sequence
  GATA2 Guide RNA
ugugagauuuagcccuccuug

SEQ ID NO: 40053 - RNA, 21 nt, Artificial Sequence
  GATA2 Guide RNA
ugugagucuugacuuauuucg

SEQ ID NO: 40054 - RNA, 21 nt, Artificial Sequence
  GATA2 Guide RNA
uuagagcgcaggguaguuggg

SEQ ID NO: 40055 - RNA, 21 nt, Artificial Sequence
  GATA2 Guide RNA
uuagcccuccuugacugagcu

SEQ ID NO: 40056 - RNA, 21 nt, Artificial Sequence
  GATA2 Guide RNA
uuagcuaccucccccaacuac

SEQ ID NO: 40057 - RNA, 21 nt, Artificial Sequence
  GATA2 Guide RNA
uuauggaguuagagcgcaggg

SEQ ID NO: 40058 - RNA, 21 nt, Artificial Sequence
  GATA2 Guide RNA
uuauuccaaaguucugugagu

SEQ ID NO: 40059 - RNA, 21 nt, Artificial Sequence
  GATA2 Guide RNA
uuccaaaguucugugagucuu

SEQ ID NO: 40060 - RNA, 21 nt, Artificial Sequence
  GATA2 Guide RNA
uuccaugguucugagaugcuu

SEQ ID NO: 40061 - RNA, 21 nt, Artificial Sequence
  GATA2 Guide RNA
uucccaugugagauuuagccc

SEQ ID NO: 40062 - RNA, 21 nt, Artificial Sequence
  GATA2 Guide RNA
uucuaaaauuccaugguucug

SEQ ID NO: 40063 - RNA, 21 nt, Artificial Sequence
  GATA2 Guide RNA
uucuaacaucaggcuucugag

SEQ ID NO: 40064 - RNA, 21 nt, Artificial Sequence
  GATA2 Guide RNA
uucuccucuguagcucuugca

SEQ ID NO: 40065 - RNA, 21 nt, Artificial Sequence
  GATA2 Guide RNA
uucugagaguucuuuauucca

SEQ ID NO: 40066 - RNA, 21 nt, Artificial Sequence
  GATA2 Guide RNA
uucugagaugcuuugauuccc

SEQ ID NO: 40067 - RNA, 21 nt, Artificial Sequence
  GATA2 Guide RNA
uucugugagucuugacuuauu

SEQ ID NO: 40068 - RNA, 21 nt, Artificial Sequence
  GATA2 Guide RNA
uugacugagcugguggggacu

SEQ ID NO: 40069 - RNA, 21 nt, Artificial Sequence
  GATA2 Guide RNA
uugagaacgaaauaagucaag

SEQ ID NO: 40070 - RNA, 21 nt, Artificial Sequence
  GATA2 Guide RNA
uugauucccaugugagauuua

SEQ ID NO: 40071 - RNA, 21 nt, Artificial Sequence
  GATA2 Guide RNA
uugcaagagcuacagaggaga

SEQ ID NO: 40072 - RNA, 21 nt, Artificial Sequence
  GATA2 Guide RNA
uuggaauaaagaacucucaga

SEQ ID NO: 40073 - RNA, 21 nt, Artificial Sequence
  GATA2 Guide RNA
uugggggagguagcuaauucu

SEQ ID NO: 40074 - RNA, 21 nt, Artificial Sequence
  GATA2 Guide RNA
uuuagcccuccuugacugagc

SEQ ID NO: 40075 - RNA, 21 nt, Artificial Sequence
  GATA2 Guide RNA
uuuauggaguuagagcgcagg

SEQ ID NO: 40076 - RNA, 21 nt, Artificial Sequence
  GATA2 Guide RNA
uuuauuccaaaguucugugag

SEQ ID NO: 40077 - RNA, 21 nt, Artificial Sequence
  GATA2 Guide RNA
uuugauucccaugugagauuu

SEQ ID NO: 40078 - RNA, 21 nt, Artificial Sequence
  GATA2 Guide RNA
uuuggaauaaagaacucucag

SEQ ID NO: 40079 - RNA, 22 nt, Artificial Sequence
  GATA2 Guide RNA
aaaauuccaugguucugagaug

SEQ ID NO: 40080 - RNA, 22 nt, Artificial Sequence
  GATA2 Guide RNA
aaagaacucucagaagccugau

SEQ ID NO: 40081 - RNA, 22 nt, Artificial Sequence
  GATA2 Guide RNA
aaagcaucucagaaccauggaa

SEQ ID NO: 40082 - RNA, 22 nt, Artificial Sequence
  GATA2 Guide RNA
aaaguucugugagucuugacuu

SEQ ID NO: 40083 - RNA, 22 nt, Artificial Sequence
  GATA2 Guide RNA
aaauaagucaagacucacagaa

SEQ ID NO: 40084 - RNA, 22 nt, Artificial Sequence
  GATA2 Guide RNA
aaaucucacaugggaaucaaag

SEQ ID NO: 40085 - RNA, 22 nt, Artificial Sequence
  GATA2 Guide RNA
aaauuccaugguucugagaugc

SEQ ID NO: 40086 - RNA, 22 nt, Artificial Sequence
  GATA2 Guide RNA
aacaucaggcuucugagaguuc

SEQ ID NO: 40087 - RNA, 22 nt, Artificial Sequence
  GATA2 Guide RNA
aacgaaauaagucaagacucac

SEQ ID NO: 40088 - RNA, 22 nt, Artificial Sequence
  GATA2 Guide RNA
aacgggauugcaagagcuacag

SEQ ID NO: 40089 - RNA, 22 nt, Artificial Sequence
  GATA2 Guide RNA
aacuacccugcgcucuaacucc

SEQ ID NO: 40090 - RNA, 22 nt, Artificial Sequence
  GATA2 Guide RNA
aacuuuggaauaaagaacucuc

SEQ ID NO: 40091 - RNA, 22 nt, Artificial Sequence
  GATA2 Guide RNA
aagaacucucagaagccugaug

SEQ ID NO: 40092 - RNA, 22 nt, Artificial Sequence
  GATA2 Guide RNA
aagacucacagaacuuuggaau

SEQ ID NO: 40093 - RNA, 22 nt, Artificial Sequence
  GATA2 Guide RNA
aagagcuacagaggagaauuag

SEQ ID NO: 40094 - RNA, 22 nt, Artificial Sequence
  GATA2 Guide RNA
aagcaucucagaaccauggaau

SEQ ID NO: 40095 - RNA, 22 nt, Artificial Sequence
  GATA2 Guide RNA
aaggagggcuaaaucucacaug

SEQ ID NO: 40096 - RNA, 22 nt, Artificial Sequence
  GATA2 Guide RNA
aagucaagacucacagaacuuu

SEQ ID NO: 40097 - RNA, 22 nt, Artificial Sequence
  GATA2 Guide RNA
aaguucugugagucuugacuua

SEQ ID NO: 40098 - RNA, 22 nt, Artificial Sequence
  GATA2 Guide RNA
aauaaagaacucucagaagccu

SEQ ID NO: 40099 - RNA, 22 nt, Artificial Sequence
  GATA2 Guide RNA
aauaagucaagacucacagaac

SEQ ID NO: 40100 - RNA, 22 nt, Artificial Sequence
  GATA2 Guide RNA
aaucaaagcaucucagaaccau

SEQ ID NO: 40101 - RNA, 22 nt, Artificial Sequence
  GATA2 Guide RNA
aaucucacaugggaaucaaagc

SEQ ID NO: 40102 - RNA, 22 nt, Artificial Sequence
  GATA2 Guide RNA
aauuagcuaccucccccaacua

SEQ ID NO: 40103 - RNA, 22 nt, Artificial Sequence
  GATA2 Guide RNA
aauuccaugguucugagaugcu

SEQ ID NO: 40104 - RNA, 22 nt, Artificial Sequence
  GATA2 Guide RNA
aauucuccucuguagcucuugc

SEQ ID NO: 40105 - RNA, 22 nt, Artificial Sequence
  GATA2 Guide RNA
acagaacuuuggaauaaagaac

SEQ ID NO: 40106 - RNA, 22 nt, Artificial Sequence
  GATA2 Guide RNA
acagaggagaauuagcuaccuc

SEQ ID NO: 40107 - RNA, 22 nt, Artificial Sequence
  GATA2 Guide RNA
acaucaggcuucugagaguucu

SEQ ID NO: 40108 - RNA, 22 nt, Artificial Sequence
  GATA2 Guide RNA
acaugggaaucaaagcaucuca

SEQ ID NO: 40109 - RNA, 22 nt, Artificial Sequence
  GATA2 Guide RNA
accagcucagucaaggagggcu

SEQ ID NO: 40110 - RNA, 22 nt, Artificial Sequence
  GATA2 Guide RNA
acccccaguccccaccagcuca

SEQ ID NO: 40111 - RNA, 22 nt, Artificial Sequence
  GATA2 Guide RNA
accccccucccugacccucgcu

SEQ ID NO: 40112 - RNA, 22 nt, Artificial Sequence
  GATA2 Guide RNA
acccucgcuccacccccagucc

SEQ ID NO: 40113 - RNA, 22 nt, Artificial Sequence
  GATA2 Guide RNA
acccugcgcucuaacuccauaa

SEQ ID NO: 40114 - RNA, 22 nt, Artificial Sequence
  GATA2 Guide RNA
accucccccaacuacccugcgc

SEQ ID NO: 40115 - RNA, 22 nt, Artificial Sequence
  GATA2 Guide RNA
accucgaccccccucccugacc

SEQ ID NO: 40116 - RNA, 22 nt, Artificial Sequence
  GATA2 Guide RNA
acgaaauaagucaagacucaca

SEQ ID NO: 40117 - RNA, 22 nt, Artificial Sequence
  GATA2 Guide RNA
acgcccaccucgaccccccucc

SEQ ID NO: 40118 - RNA, 22 nt, Artificial Sequence
  GATA2 Guide RNA
acgggauugcaagagcuacaga

SEQ ID NO: 40119 - RNA, 22 nt, Artificial Sequence
  GATA2 Guide RNA
acuacccugcgcucuaacucca

SEQ ID NO: 40120 - RNA, 22 nt, Artificial Sequence
  GATA2 Guide RNA
acucacagaacuuuggaauaaa

SEQ ID NO: 40121 - RNA, 22 nt, Artificial Sequence
  GATA2 Guide RNA
acucccacgcccaccucgaccc

SEQ ID NO: 40122 - RNA, 22 nt, Artificial Sequence
  GATA2 Guide RNA
acugagcugguggggacugggg

SEQ ID NO: 40123 - RNA, 22 nt, Artificial Sequence
  GATA2 Guide RNA
acuggggguggagcgaggguca

SEQ ID NO: 40124 - RNA, 22 nt, Artificial Sequence
  GATA2 Guide RNA
acuuuggaauaaagaacucuca

SEQ ID NO: 40125 - RNA, 22 nt, Artificial Sequence
  GATA2 Guide RNA
agaacgaaauaagucaagacuc

SEQ ID NO: 40126 - RNA, 22 nt, Artificial Sequence
  GATA2 Guide RNA
agaacucucagaagccugaugu

SEQ ID NO: 40127 - RNA, 22 nt, Artificial Sequence
  GATA2 Guide RNA
agaacuuuggaauaaagaacuc

SEQ ID NO: 40128 - RNA, 22 nt, Artificial Sequence
  GATA2 Guide RNA
agaauuagcuaccucccccaac

SEQ ID NO: 40129 - RNA, 22 nt, Artificial Sequence
  GATA2 Guide RNA
agacucacagaacuuuggaaua

SEQ ID NO: 40130 - RNA, 22 nt, Artificial Sequence
  GATA2 Guide RNA
agagcgcaggguaguuggggga

SEQ ID NO: 40131 - RNA, 22 nt, Artificial Sequence
  GATA2 Guide RNA
agagcuacagaggagaauuagc

SEQ ID NO: 40132 - RNA, 22 nt, Artificial Sequence
  GATA2 Guide RNA
agaggagaauuagcuaccuccc

SEQ ID NO: 40133 - RNA, 22 nt, Artificial Sequence
  GATA2 Guide RNA
agaguucuuuauuccaaaguuc

SEQ ID NO: 40134 - RNA, 22 nt, Artificial Sequence
  GATA2 Guide RNA
agaugcuuugauucccauguga

SEQ ID NO: 40135 - RNA, 22 nt, Artificial Sequence
  GATA2 Guide RNA
agauuuagcccuccuugacuga

SEQ ID NO: 40136 - RNA, 22 nt, Artificial Sequence
  GATA2 Guide RNA
agcaggcuggacucccacgccc

SEQ ID NO: 40137 - RNA, 22 nt, Artificial Sequence
  GATA2 Guide RNA
agcaucucagaaccauggaauu

SEQ ID NO: 40138 - RNA, 22 nt, Artificial Sequence
  GATA2 Guide RNA
agcccuccuugacugagcuggu

SEQ ID NO: 40139 - RNA, 22 nt, Artificial Sequence
  GATA2 Guide RNA
agcgagggucagggaggggggu

SEQ ID NO: 40140 - RNA, 22 nt, Artificial Sequence
  GATA2 Guide RNA
agcgcaggguaguugggggagg

SEQ ID NO: 40141 - RNA, 22 nt, Artificial Sequence
  GATA2 Guide RNA
agcuaauucuccucuguagcuc

SEQ ID NO: 40142 - RNA, 22 nt, Artificial Sequence
  GATA2 Guide RNA
agcuacagaggagaauuagcua

SEQ ID NO: 40143 - RNA, 22 nt, Artificial Sequence
  GATA2 Guide RNA
agcuaccucccccaacuacccu

SEQ ID NO: 40144 - RNA, 22 nt, Artificial Sequence
  GATA2 Guide RNA
agcucagucaaggagggcuaaa

SEQ ID NO: 40145 - RNA, 22 nt, Artificial Sequence
  GATA2 Guide RNA
agcugguggggacugggggugg

SEQ ID NO: 40146 - RNA, 22 nt, Artificial Sequence
  GATA2 Guide RNA
aggagaauuagcuaccuccccc

SEQ ID NO: 40147 - RNA, 22 nt, Artificial Sequence
  GATA2 Guide RNA
aggagggcuaaaucucacaugg

SEQ ID NO: 40148 - RNA, 22 nt, Artificial Sequence
  GATA2 Guide RNA
aggcuggacucccacgcccacc

SEQ ID NO: 40149 - RNA, 22 nt, Artificial Sequence
  GATA2 Guide RNA
aggcuucugagaguucuuuauu

SEQ ID NO: 40150 - RNA, 22 nt, Artificial Sequence
  GATA2 Guide RNA
agggaggggggucgaggugggc

SEQ ID NO: 40151 - RNA, 22 nt, Artificial Sequence
  GATA2 Guide RNA
agggcuaaaucucacaugggaa

SEQ ID NO: 40152 - RNA, 22 nt, Artificial Sequence
  GATA2 Guide RNA
aggggggucgaggugggcgugg

SEQ ID NO: 40153 - RNA, 22 nt, Artificial Sequence
  GATA2 Guide RNA
aggguaguugggggagguagcu

SEQ ID NO: 40154 - RNA, 22 nt, Artificial Sequence
  GATA2 Guide RNA
agggucagggaggggggucgag

SEQ ID NO: 40155 - RNA, 22 nt, Artificial Sequence
  GATA2 Guide RNA
agguagcuaauucuccucugua

SEQ ID NO: 40156 - RNA, 22 nt, Artificial Sequence
  GATA2 Guide RNA
aggugggcgugggaguccagcc

SEQ ID NO: 40157 - RNA, 22 nt, Artificial Sequence
  GATA2 Guide RNA
agucaagacucacagaacuuug

SEQ ID NO: 40158 - RNA, 22 nt, Artificial Sequence
  GATA2 Guide RNA
agucaaggagggcuaaaucuca

SEQ ID NO: 40159 - RNA, 22 nt, Artificial Sequence
  GATA2 Guide RNA
aguccccaccagcucagucaag

SEQ ID NO: 40160 - RNA, 22 nt, Artificial Sequence
  GATA2 Guide RNA
agucuugacuuauuucguucuc

SEQ ID NO: 40161 - RNA, 22 nt, Artificial Sequence
  GATA2 Guide RNA
aguuagagcgcaggguaguugg

SEQ ID NO: 40162 - RNA, 22 nt, Artificial Sequence
  GATA2 Guide RNA
aguucugugagucuugacuuau

SEQ ID NO: 40163 - RNA, 22 nt, Artificial Sequence
  GATA2 Guide RNA
aguucuuuauuccaaaguucug

SEQ ID NO: 40164 - RNA, 22 nt, Artificial Sequence
  GATA2 Guide RNA
aguugggggagguagcuaauuc

SEQ ID NO: 40165 - RNA, 22 nt, Artificial Sequence
  GATA2 Guide RNA
auaaagaacucucagaagccug

SEQ ID NO: 40166 - RNA, 22 nt, Artificial Sequence
  GATA2 Guide RNA
auaagucaagacucacagaacu

SEQ ID NO: 40167 - RNA, 22 nt, Artificial Sequence
  GATA2 Guide RNA
aucaaagcaucucagaaccaug

SEQ ID NO: 40168 - RNA, 22 nt, Artificial Sequence
  GATA2 Guide RNA
aucaggcuucugagaguucuuu

SEQ ID NO: 40169 - RNA, 22 nt, Artificial Sequence
  GATA2 Guide RNA
aucucacaugggaaucaaagca

SEQ ID NO: 40170 - RNA, 22 nt, Artificial Sequence
  GATA2 Guide RNA
aucucagaaccauggaauuuua

SEQ ID NO: 40171 - RNA, 22 nt, Artificial Sequence
  GATA2 Guide RNA
augcuuugauucccaugugaga

SEQ ID NO: 40172 - RNA, 22 nt, Artificial Sequence
  GATA2 Guide RNA
auggaguuagagcgcaggguag

SEQ ID NO: 40173 - RNA, 22 nt, Artificial Sequence
  GATA2 Guide RNA
augggaaucaaagcaucucaga

SEQ ID NO: 40174 - RNA, 22 nt, Artificial Sequence
  GATA2 Guide RNA
augguucugagaugcuuugauu

SEQ ID NO: 40175 - RNA, 22 nt, Artificial Sequence
  GATA2 Guide RNA
augugagauuuagcccuccuug

SEQ ID NO: 40176 - RNA, 22 nt, Artificial Sequence
  GATA2 Guide RNA
auuagcuaccucccccaacuac

SEQ ID NO: 40177 - RNA, 22 nt, Artificial Sequence
  GATA2 Guide RNA
auuccaaaguucugugagucuu

SEQ ID NO: 40178 - RNA, 22 nt, Artificial Sequence
  GATA2 Guide RNA
auuccaugguucugagaugcuu

SEQ ID NO: 40179 - RNA, 22 nt, Artificial Sequence
  GATA2 Guide RNA
auucccaugugagauuuagccc

SEQ ID NO: 40180 - RNA, 22 nt, Artificial Sequence
  GATA2 Guide RNA
auucuaaaauuccaugguucug

SEQ ID NO: 40181 - RNA, 22 nt, Artificial Sequence
  GATA2 Guide RNA
auucuccucuguagcucuugca

SEQ ID NO: 40182 - RNA, 22 nt, Artificial Sequence
  GATA2 Guide RNA
auugcaagagcuacagaggaga

SEQ ID NO: 40183 - RNA, 22 nt, Artificial Sequence
  GATA2 Guide RNA
auuuagcccuccuugacugagc

SEQ ID NO: 40184 - RNA, 22 nt, Artificial Sequence
  GATA2 Guide RNA
auuuauggaguuagagcgcagg

SEQ ID NO: 40185 - RNA, 22 nt, Artificial Sequence
  GATA2 Guide RNA
caaagcaucucagaaccaugga

SEQ ID NO: 40186 - RNA, 22 nt, Artificial Sequence
  GATA2 Guide RNA
caaaguucugugagucuugacu

SEQ ID NO: 40187 - RNA, 22 nt, Artificial Sequence
  GATA2 Guide RNA
caacgggauugcaagagcuaca

SEQ ID NO: 40188 - RNA, 22 nt, Artificial Sequence
  GATA2 Guide RNA
caacuacccugcgcucuaacuc

SEQ ID NO: 40189 - RNA, 22 nt, Artificial Sequence
  GATA2 Guide RNA
caagacucacagaacuuuggaa

SEQ ID NO: 40190 - RNA, 22 nt, Artificial Sequence
  GATA2 Guide RNA
caagagcuacagaggagaauua

SEQ ID NO: 40191 - RNA, 22 nt, Artificial Sequence
  GATA2 Guide RNA
caaggagggcuaaaucucacau

SEQ ID NO: 40192 - RNA, 22 nt, Artificial Sequence
  GATA2 Guide RNA
cacagaacuuuggaauaaagaa

SEQ ID NO: 40193 - RNA, 22 nt, Artificial Sequence
  GATA2 Guide RNA
cacaugggaaucaaagcaucuc

SEQ ID NO: 40194 - RNA, 22 nt, Artificial Sequence
  GATA2 Guide RNA
caccagcucagucaaggagggc

SEQ ID NO: 40195 - RNA, 22 nt, Artificial Sequence
  GATA2 Guide RNA
cacccccaguccccaccagcuc

SEQ ID NO: 40196 - RNA, 22 nt, Artificial Sequence
  GATA2 Guide RNA
caccucgaccccccucccugac

SEQ ID NO: 40197 - RNA, 22 nt, Artificial Sequence
  GATA2 Guide RNA
cacgcccaccucgaccccccuc

SEQ ID NO: 40198 - RNA, 22 nt, Artificial Sequence
  GATA2 Guide RNA
cagaaccauggaauuuuagaau

SEQ ID NO: 40199 - RNA, 22 nt, Artificial Sequence
  GATA2 Guide RNA
cagaacuuuggaauaaagaacu

SEQ ID NO: 40200 - RNA, 22 nt, Artificial Sequence
  GATA2 Guide RNA
cagaggagaauuagcuaccucc

SEQ ID NO: 40201 - RNA, 22 nt, Artificial Sequence
  GATA2 Guide RNA
cagcaggcuggacucccacgcc

SEQ ID NO: 40202 - RNA, 22 nt, Artificial Sequence
  GATA2 Guide RNA
cagcucagucaaggagggcuaa

SEQ ID NO: 40203 - RNA, 22 nt, Artificial Sequence
  GATA2 Guide RNA
caggcuggacucccacgcccac

SEQ ID NO: 40204 - RNA, 22 nt, Artificial Sequence
  GATA2 Guide RNA
caggcuucugagaguucuuuau

SEQ ID NO: 40205 - RNA, 22 nt, Artificial Sequence
  GATA2 Guide RNA
cagggaggggggucgagguggg

SEQ ID NO: 40206 - RNA, 22 nt, Artificial Sequence
  GATA2 Guide RNA
caggguaguugggggagguagc

SEQ ID NO: 40207 - RNA, 22 nt, Artificial Sequence
  GATA2 Guide RNA
cagucaaggagggcuaaaucuc

SEQ ID NO: 40208 - RNA, 22 nt, Artificial Sequence
  GATA2 Guide RNA
caguccccaccagcucagucaa

SEQ ID NO: 40209 - RNA, 22 nt, Artificial Sequence
  GATA2 Guide RNA
caucaggcuucugagaguucuu

SEQ ID NO: 40210 - RNA, 22 nt, Artificial Sequence
  GATA2 Guide RNA
caucucagaaccauggaauuuu

SEQ ID NO: 40211 - RNA, 22 nt, Artificial Sequence
  GATA2 Guide RNA
caugggaaucaaagcaucucag

SEQ ID NO: 40212 - RNA, 22 nt, Artificial Sequence
  GATA2 Guide RNA
caugguucugagaugcuuugau

SEQ ID NO: 40213 - RNA, 22 nt, Artificial Sequence
  GATA2 Guide RNA
caugugagauuuagcccuccuu

SEQ ID NO: 40214 - RNA, 22 nt, Artificial Sequence
  GATA2 Guide RNA
cauuuauggaguuagagcgcag

SEQ ID NO: 40215 - RNA, 22 nt, Artificial Sequence
  GATA2 Guide RNA
ccaaaguucugugagucuugac

SEQ ID NO: 40216 - RNA, 22 nt, Artificial Sequence
  GATA2 Guide RNA
ccaacuacccugcgcucuaacu

SEQ ID NO: 40217 - RNA, 22 nt, Artificial Sequence
  GATA2 Guide RNA
ccaccagcucagucaaggaggg

SEQ ID NO: 40218 - RNA, 22 nt, Artificial Sequence
  GATA2 Guide RNA
ccacccccaguccccaccagcu

SEQ ID NO: 40219 - RNA, 22 nt, Artificial Sequence
  GATA2 Guide RNA
ccaccucgaccccccucccuga

SEQ ID NO: 40220 - RNA, 22 nt, Artificial Sequence
  GATA2 Guide RNA
ccacgcccaccucgaccccccu

SEQ ID NO: 40221 - RNA, 22 nt, Artificial Sequence
  GATA2 Guide RNA
ccagcucagucaaggagggcua

SEQ ID NO: 40222 - RNA, 22 nt, Artificial Sequence
  GATA2 Guide RNA
ccaguccccaccagcucaguca

SEQ ID NO: 40223 - RNA, 22 nt, Artificial Sequence
  GATA2 Guide RNA
ccauggaauuuuagaauuugag

SEQ ID NO: 40224 - RNA, 22 nt, Artificial Sequence
  GATA2 Guide RNA
ccaugguucugagaugcuuuga

SEQ ID NO: 40225 - RNA, 22 nt, Artificial Sequence
  GATA2 Guide RNA
ccaugugagauuuagcccuccu

SEQ ID NO: 40226 - RNA, 22 nt, Artificial Sequence
  GATA2 Guide RNA
ccauuuauggaguuagagcgca

SEQ ID NO: 40227 - RNA, 22 nt, Artificial Sequence
  GATA2 Guide RNA
cccaacuacccugcgcucuaac

SEQ ID NO: 40228 - RNA, 22 nt, Artificial Sequence
  GATA2 Guide RNA
cccaccagcucagucaaggagg

SEQ ID NO: 40229 - RNA, 22 nt, Artificial Sequence
  GATA2 Guide RNA
cccaccucgaccccccucccug

SEQ ID NO: 40230 - RNA, 22 nt, Artificial Sequence
  GATA2 Guide RNA
cccaguccccaccagcucaguc

SEQ ID NO: 40231 - RNA, 22 nt, Artificial Sequence
  GATA2 Guide RNA
cccaugugagauuuagcccucc

SEQ ID NO: 40232 - RNA, 22 nt, Artificial Sequence
  GATA2 Guide RNA
cccauuuauggaguuagagcgc

SEQ ID NO: 40233 - RNA, 22 nt, Artificial Sequence
  GATA2 Guide RNA
ccccaacuacccugcgcucuaa

SEQ ID NO: 40234 - RNA, 22 nt, Artificial Sequence
  GATA2 Guide RNA
ccccaccagcucagucaaggag

SEQ ID NO: 40235 - RNA, 22 nt, Artificial Sequence
  GATA2 Guide RNA
ccccaguccccaccagcucagu

SEQ ID NO: 40236 - RNA, 22 nt, Artificial Sequence
  GATA2 Guide RNA
ccccauuuauggaguuagagcg

SEQ ID NO: 40237 - RNA, 22 nt, Artificial Sequence
  GATA2 Guide RNA
cccccaacuacccugcgcucua

SEQ ID NO: 40238 - RNA, 22 nt, Artificial Sequence
  GATA2 Guide RNA
cccccaguccccaccagcucag

SEQ ID NO: 40239 - RNA, 22 nt, Artificial Sequence
  GATA2 Guide RNA
ccccccucccugacccucgcuc

SEQ ID NO: 40240 - RNA, 22 nt, Artificial Sequence
  GATA2 Guide RNA
cccccucccugacccucgcucc

SEQ ID NO: 40241 - RNA, 22 nt, Artificial Sequence
  GATA2 Guide RNA
ccccucccugacccucgcucca

SEQ ID NO: 40242 - RNA, 22 nt, Artificial Sequence
  GATA2 Guide RNA
cccucccugacccucgcuccac

SEQ ID NO: 40243 - RNA, 22 nt, Artificial Sequence
  GATA2 Guide RNA
cccuccuugacugagcuggugg

SEQ ID NO: 40244 - RNA, 22 nt, Artificial Sequence
  GATA2 Guide RNA
cccucgcuccacccccaguccc

SEQ ID NO: 40245 - RNA, 22 nt, Artificial Sequence
  GATA2 Guide RNA
cccugacccucgcuccaccccc

SEQ ID NO: 40246 - RNA, 22 nt, Artificial Sequence
  GATA2 Guide RNA
cccugcgcucuaacuccauaaa

SEQ ID NO: 40247 - RNA, 22 nt, Artificial Sequence
  GATA2 Guide RNA
ccucccccaacuacccugcgcu

SEQ ID NO: 40248 - RNA, 22 nt, Artificial Sequence
  GATA2 Guide RNA
ccucccugacccucgcuccacc

SEQ ID NO: 40249 - RNA, 22 nt, Artificial Sequence
  GATA2 Guide RNA
ccuccuugacugagcugguggg

SEQ ID NO: 40250 - RNA, 22 nt, Artificial Sequence
  GATA2 Guide RNA
ccucgaccccccucccugaccc

SEQ ID NO: 40251 - RNA, 22 nt, Artificial Sequence
  GATA2 Guide RNA
ccucgcuccacccccagucccc

SEQ ID NO: 40252 - RNA, 22 nt, Artificial Sequence
  GATA2 Guide RNA
ccucuguagcucuugcaauccc

SEQ ID NO: 40253 - RNA, 22 nt, Artificial Sequence
  GATA2 Guide RNA
ccugacccucgcuccaccccca

SEQ ID NO: 40254 - RNA, 22 nt, Artificial Sequence
  GATA2 Guide RNA
ccugcgcucuaacuccauaaau

SEQ ID NO: 40255 - RNA, 22 nt, Artificial Sequence
  GATA2 Guide RNA
ccuugacugagcugguggggac

SEQ ID NO: 40256 - RNA, 22 nt, Artificial Sequence
  GATA2 Guide RNA
cgaaauaagucaagacucacag

SEQ ID NO: 40257 - RNA, 22 nt, Artificial Sequence
  GATA2 Guide RNA
cgaccccccucccugacccucg

SEQ ID NO: 40258 - RNA, 22 nt, Artificial Sequence
  GATA2 Guide RNA
cgagggucagggaggggggucg

SEQ ID NO: 40259 - RNA, 22 nt, Artificial Sequence
  GATA2 Guide RNA
cgaggugggcgugggaguccag

SEQ ID NO: 40260 - RNA, 22 nt, Artificial Sequence
  GATA2 Guide RNA
cgcaggguaguugggggaggua

SEQ ID NO: 40261 - RNA, 22 nt, Artificial Sequence
  GATA2 Guide RNA
cgcuccacccccaguccccacc

SEQ ID NO: 40262 - RNA, 22 nt, Artificial Sequence
  GATA2 Guide RNA
cgggauugcaagagcuacagag

SEQ ID NO: 40263 - RNA, 22 nt, Artificial Sequence
  GATA2 Guide RNA
cguucucaaauucuaaaauucc

SEQ ID NO: 40264 - RNA, 22 nt, Artificial Sequence
  GATA2 Guide RNA
cuaaaauuccaugguucugaga

SEQ ID NO: 40265 - RNA, 22 nt, Artificial Sequence
  GATA2 Guide RNA
cuaaaucucacaugggaaucaa

SEQ ID NO: 40266 - RNA, 22 nt, Artificial Sequence
  GATA2 Guide RNA
cuaacaucaggcuucugagagu

SEQ ID NO: 40267 - RNA, 22 nt, Artificial Sequence
  GATA2 Guide RNA
cuaauucuccucuguagcucuu

SEQ ID NO: 40268 - RNA, 22 nt, Artificial Sequence
  GATA2 Guide RNA
cuacagaggagaauuagcuacc

SEQ ID NO: 40269 - RNA, 22 nt, Artificial Sequence
  GATA2 Guide RNA
cuacccugcgcucuaacuccau

SEQ ID NO: 40270 - RNA, 22 nt, Artificial Sequence
  GATA2 Guide RNA
cuaccucccccaacuacccugc

SEQ ID NO: 40271 - RNA, 22 nt, Artificial Sequence
  GATA2 Guide RNA
cucaaauucuaaaauuccaugg

SEQ ID NO: 40272 - RNA, 22 nt, Artificial Sequence
  GATA2 Guide RNA
cucacagaacuuuggaauaaag

SEQ ID NO: 40273 - RNA, 22 nt, Artificial Sequence
  GATA2 Guide RNA
cucacaugggaaucaaagcauc

SEQ ID NO: 40274 - RNA, 22 nt, Artificial Sequence
  GATA2 Guide RNA
cucagaaccauggaauuuuaga

SEQ ID NO: 40275 - RNA, 22 nt, Artificial Sequence
  GATA2 Guide RNA
cucagucaaggagggcuaaauc

SEQ ID NO: 40276 - RNA, 22 nt, Artificial Sequence
  GATA2 Guide RNA
cuccacccccaguccccaccag

SEQ ID NO: 40277 - RNA, 22 nt, Artificial Sequence
  GATA2 Guide RNA
cucccacgcccaccucgacccc

SEQ ID NO: 40278 - RNA, 22 nt, Artificial Sequence
  GATA2 Guide RNA
cucccccaacuacccugcgcuc

SEQ ID NO: 40279 - RNA, 22 nt, Artificial Sequence
  GATA2 Guide RNA
cucccugacccucgcuccaccc

SEQ ID NO: 40280 - RNA, 22 nt, Artificial Sequence
  GATA2 Guide RNA
cuccucuguagcucuugcaauc

SEQ ID NO: 40281 - RNA, 22 nt, Artificial Sequence
  GATA2 Guide RNA
cuccuugacugagcuggugggg

SEQ ID NO: 40282 - RNA, 22 nt, Artificial Sequence
  GATA2 Guide RNA
cucgaccccccucccugacccu

SEQ ID NO: 40283 - RNA, 22 nt, Artificial Sequence
  GATA2 Guide RNA
cucgcuccacccccagucccca

SEQ ID NO: 40284 - RNA, 22 nt, Artificial Sequence
  GATA2 Guide RNA
cucuguagcucuugcaaucccg

SEQ ID NO: 40285 - RNA, 22 nt, Artificial Sequence
  GATA2 Guide RNA
cugacccucgcuccacccccag

SEQ ID NO: 40286 - RNA, 22 nt, Artificial Sequence
  GATA2 Guide RNA
cugagaguucuuuauuccaaag

SEQ ID NO: 40287 - RNA, 22 nt, Artificial Sequence
  GATA2 Guide RNA
cugagaugcuuugauucccaug

SEQ ID NO: 40288 - RNA, 22 nt, Artificial Sequence
  GATA2 Guide RNA
cugagcugguggggacuggggg

SEQ ID NO: 40289 - RNA, 22 nt, Artificial Sequence
  GATA2 Guide RNA
cugcgcucuaacuccauaaaug

SEQ ID NO: 40290 - RNA, 22 nt, Artificial Sequence
  GATA2 Guide RNA
cuggacucccacgcccaccucg

SEQ ID NO: 40291 - RNA, 22 nt, Artificial Sequence
  GATA2 Guide RNA
cuggggguggagcgagggucag

SEQ ID NO: 40292 - RNA, 22 nt, Artificial Sequence
  GATA2 Guide RNA
cugguggggacuggggguggag

SEQ ID NO: 40293 - RNA, 22 nt, Artificial Sequence
  GATA2 Guide RNA
cugugagucuugacuuauuucg

SEQ ID NO: 40294 - RNA, 22 nt, Artificial Sequence
  GATA2 Guide RNA
cuucugagaguucuuuauucca

SEQ ID NO: 40295 - RNA, 22 nt, Artificial Sequence
  GATA2 Guide RNA
cuugacugagcugguggggacu

SEQ ID NO: 40296 - RNA, 22 nt, Artificial Sequence
  GATA2 Guide RNA
cuugacuuauuucguucucaaa

SEQ ID NO: 40297 - RNA, 22 nt, Artificial Sequence
  GATA2 Guide RNA
cuuuauuccaaaguucugugag

SEQ ID NO: 40298 - RNA, 22 nt, Artificial Sequence
  GATA2 Guide RNA
cuuugauucccaugugagauuu

SEQ ID NO: 40299 - RNA, 22 nt, Artificial Sequence
  GATA2 Guide RNA
cuuuggaauaaagaacucucag

SEQ ID NO: 40300 - RNA, 22 nt, Artificial Sequence
  GATA2 Guide RNA
gaaauaagucaagacucacaga

SEQ ID NO: 40301 - RNA, 22 nt, Artificial Sequence
  GATA2 Guide RNA
gaacgaaauaagucaagacuca

SEQ ID NO: 40302 - RNA, 22 nt, Artificial Sequence
  GATA2 Guide RNA
gaacucucagaagccugauguu

SEQ ID NO: 40303 - RNA, 22 nt, Artificial Sequence
  GATA2 Guide RNA
gaacuuuggaauaaagaacucu

SEQ ID NO: 40304 - RNA, 22 nt, Artificial Sequence
  GATA2 Guide RNA
gaauaaagaacucucagaagcc

SEQ ID NO: 40305 - RNA, 22 nt, Artificial Sequence
  GATA2 Guide RNA
gaaucaaagcaucucagaacca

SEQ ID NO: 40306 - RNA, 22 nt, Artificial Sequence
  GATA2 Guide RNA
gaauuagcuaccucccccaacu

SEQ ID NO: 40307 - RNA, 22 nt, Artificial Sequence
  GATA2 Guide RNA
gaauuugagaacgaaauaaguc

SEQ ID NO: 40308 - RNA, 22 nt, Artificial Sequence
  GATA2 Guide RNA
gaccccccucccugacccucgc

SEQ ID NO: 40309 - RNA, 22 nt, Artificial Sequence
  GATA2 Guide RNA
gacccucgcuccacccccaguc

SEQ ID NO: 40310 - RNA, 22 nt, Artificial Sequence
  GATA2 Guide RNA
gacucacagaacuuuggaauaa

SEQ ID NO: 40311 - RNA, 22 nt, Artificial Sequence
  GATA2 Guide RNA
gacucccacgcccaccucgacc

SEQ ID NO: 40312 - RNA, 22 nt, Artificial Sequence
  GATA2 Guide RNA
gacugagcugguggggacuggg

SEQ ID NO: 40313 - RNA, 22 nt, Artificial Sequence
  GATA2 Guide RNA
gacuggggguggagcgaggguc

SEQ ID NO: 40314 - RNA, 22 nt, Artificial Sequence
  GATA2 Guide RNA
gacuuauuucguucucaaauuc

SEQ ID NO: 40315 - RNA, 22 nt, Artificial Sequence
  GATA2 Guide RNA
gagaacgaaauaagucaagacu

SEQ ID NO: 40316 - RNA, 22 nt, Artificial Sequence
  GATA2 Guide RNA
gagaauuagcuaccucccccaa

SEQ ID NO: 40317 - RNA, 22 nt, Artificial Sequence
  GATA2 Guide RNA
gagaguucuuuauuccaaaguu

SEQ ID NO: 40318 - RNA, 22 nt, Artificial Sequence
  GATA2 Guide RNA
gagaugcuuugauucccaugug

SEQ ID NO: 40319 - RNA, 22 nt, Artificial Sequence
  GATA2 Guide RNA
gagauuuagcccuccuugacug

SEQ ID NO: 40320 - RNA, 22 nt, Artificial Sequence
  GATA2 Guide RNA
gagcgagggucagggagggggg

SEQ ID NO: 40321 - RNA, 22 nt, Artificial Sequence
  GATA2 Guide RNA
gagcgcaggguaguugggggag

SEQ ID NO: 40322 - RNA, 22 nt, Artificial Sequence
  GATA2 Guide RNA
gagcuacagaggagaauuagcu

SEQ ID NO: 40323 - RNA, 22 nt, Artificial Sequence
  GATA2 Guide RNA
gagcugguggggacugggggug

SEQ ID NO: 40324 - RNA, 22 nt, Artificial Sequence
  GATA2 Guide RNA
gaggagaauuagcuaccucccc

SEQ ID NO: 40325 - RNA, 22 nt, Artificial Sequence
  GATA2 Guide RNA
gagggcuaaaucucacauggga

SEQ ID NO: 40326 - RNA, 22 nt, Artificial Sequence
  GATA2 Guide RNA
gaggggggucgaggugggcgug

SEQ ID NO: 40327 - RNA, 22 nt, Artificial Sequence
  GATA2 Guide RNA
gagggucagggaggggggucga

SEQ ID NO: 40328 - RNA, 22 nt, Artificial Sequence
  GATA2 Guide RNA
gagguagcuaauucuccucugu

SEQ ID NO: 40329 - RNA, 22 nt, Artificial Sequence
  GATA2 Guide RNA
gaggugggcgugggaguccagc

SEQ ID NO: 40330 - RNA, 22 nt, Artificial Sequence
  GATA2 Guide RNA
gagucuugacuuauuucguucu

SEQ ID NO: 40331 - RNA, 22 nt, Artificial Sequence
  GATA2 Guide RNA
gaguuagagcgcaggguaguug

SEQ ID NO: 40332 - RNA, 22 nt, Artificial Sequence
  GATA2 Guide RNA
gaguucuuuauuccaaaguucu

SEQ ID NO: 40333 - RNA, 22 nt, Artificial Sequence
  GATA2 Guide RNA
gaugcuuugauucccaugugag

SEQ ID NO: 40334 - RNA, 22 nt, Artificial Sequence
  GATA2 Guide RNA
gauucccaugugagauuuagcc

SEQ ID NO: 40335 - RNA, 22 nt, Artificial Sequence
  GATA2 Guide RNA
gauugcaagagcuacagaggag

SEQ ID NO: 40336 - RNA, 22 nt, Artificial Sequence
  GATA2 Guide RNA
gauuuagcccuccuugacugag

SEQ ID NO: 40337 - RNA, 22 nt, Artificial Sequence
  GATA2 Guide RNA
gcaagagcuacagaggagaauu

SEQ ID NO: 40338 - RNA, 22 nt, Artificial Sequence
  GATA2 Guide RNA
gcaggcuggacucccacgccca

SEQ ID NO: 40339 - RNA, 22 nt, Artificial Sequence
  GATA2 Guide RNA
gcaggguaguugggggagguag

SEQ ID NO: 40340 - RNA, 22 nt, Artificial Sequence
  GATA2 Guide RNA
gcaucucagaaccauggaauuu

SEQ ID NO: 40341 - RNA, 22 nt, Artificial Sequence
  GATA2 Guide RNA
gcccaccucgaccccccucccu

SEQ ID NO: 40342 - RNA, 22 nt, Artificial Sequence
  GATA2 Guide RNA
gcccuccuugacugagcuggug

SEQ ID NO: 40343 - RNA, 22 nt, Artificial Sequence
  GATA2 Guide RNA
gcgagggucagggagggggguc

SEQ ID NO: 40344 - RNA, 22 nt, Artificial Sequence
  GATA2 Guide RNA
gcgcaggguaguugggggaggu

SEQ ID NO: 40345 - RNA, 22 nt, Artificial Sequence
  GATA2 Guide RNA
gcuaaaucucacaugggaauca

SEQ ID NO: 40346 - RNA, 22 nt, Artificial Sequence
  GATA2 Guide RNA
gcuaauucuccucuguagcucu

SEQ ID NO: 40347 - RNA, 22 nt, Artificial Sequence
  GATA2 Guide RNA
gcuacagaggagaauuagcuac

SEQ ID NO: 40348 - RNA, 22 nt, Artificial Sequence
  GATA2 Guide RNA
gcuaccucccccaacuacccug

SEQ ID NO: 40349 - RNA, 22 nt, Artificial Sequence
  GATA2 Guide RNA
gcucagucaaggagggcuaaau

SEQ ID NO: 40350 - RNA, 22 nt, Artificial Sequence
  GATA2 Guide RNA
gcuccacccccaguccccacca

SEQ ID NO: 40351 - RNA, 22 nt, Artificial Sequence
  GATA2 Guide RNA
gcuggacucccacgcccaccuc

SEQ ID NO: 40352 - RNA, 22 nt, Artificial Sequence
  GATA2 Guide RNA
gcugguggggacugggggugga

SEQ ID NO: 40353 - RNA, 22 nt, Artificial Sequence
  GATA2 Guide RNA
gcuucugagaguucuuuauucc

SEQ ID NO: 40354 - RNA, 22 nt, Artificial Sequence
  GATA2 Guide RNA
gcuuugauucccaugugagauu

SEQ ID NO: 40355 - RNA, 22 nt, Artificial Sequence
  GATA2 Guide RNA
ggaauaaagaacucucagaagc

SEQ ID NO: 40356 - RNA, 22 nt, Artificial Sequence
  GATA2 Guide RNA
ggaaucaaagcaucucagaacc

SEQ ID NO: 40357 - RNA, 22 nt, Artificial Sequence
  GATA2 Guide RNA
ggaauuuuagaauuugagaacg

SEQ ID NO: 40358 - RNA, 22 nt, Artificial Sequence
  GATA2 Guide RNA
ggacucccacgcccaccucgac

SEQ ID NO: 40359 - RNA, 22 nt, Artificial Sequence
  GATA2 Guide RNA
ggacuggggguggagcgagggu

SEQ ID NO: 40360 - RNA, 22 nt, Artificial Sequence
  GATA2 Guide RNA
ggagaauuagcuaccuccccca

SEQ ID NO: 40361 - RNA, 22 nt, Artificial Sequence
  GATA2 Guide RNA
ggagcgagggucagggaggggg

SEQ ID NO: 40362 - RNA, 22 nt, Artificial Sequence
  GATA2 Guide RNA
ggagggcuaaaucucacauggg

SEQ ID NO: 40363 - RNA, 22 nt, Artificial Sequence
  GATA2 Guide RNA
ggaggggggucgaggugggcgu

SEQ ID NO: 40364 - RNA, 22 nt, Artificial Sequence
  GATA2 Guide RNA
ggagguagcuaauucuccucug

SEQ ID NO: 40365 - RNA, 22 nt, Artificial Sequence
  GATA2 Guide RNA
ggaguuagagcgcaggguaguu

SEQ ID NO: 40366 - RNA, 22 nt, Artificial Sequence
  GATA2 Guide RNA
ggauugcaagagcuacagagga

SEQ ID NO: 40367 - RNA, 22 nt, Artificial Sequence
  GATA2 Guide RNA
ggcuaaaucucacaugggaauc

SEQ ID NO: 40368 - RNA, 22 nt, Artificial Sequence
  GATA2 Guide RNA
ggcuggacucccacgcccaccu

SEQ ID NO: 40369 - RNA, 22 nt, Artificial Sequence
  GATA2 Guide RNA
ggcuucugagaguucuuuauuc

SEQ ID NO: 40370 - RNA, 22 nt, Artificial Sequence
  GATA2 Guide RNA
gggaaucaaagcaucucagaac

SEQ ID NO: 40371 - RNA, 22 nt, Artificial Sequence
  GATA2 Guide RNA
gggacuggggguggagcgaggg

SEQ ID NO: 40372 - RNA, 22 nt, Artificial Sequence
  GATA2 Guide RNA
gggagguagcuaauucuccucu

SEQ ID NO: 40373 - RNA, 22 nt, Artificial Sequence
  GATA2 Guide RNA
gggauugcaagagcuacagagg

SEQ ID NO: 40374 - RNA, 22 nt, Artificial Sequence
  GATA2 Guide RNA
gggcuaaaucucacaugggaau

SEQ ID NO: 40375 - RNA, 22 nt, Artificial Sequence
  GATA2 Guide RNA
ggggacuggggguggagcgagg

SEQ ID NO: 40376 - RNA, 22 nt, Artificial Sequence
  GATA2 Guide RNA
ggggagguagcuaauucuccuc

SEQ ID NO: 40377 - RNA, 22 nt, Artificial Sequence
  GATA2 Guide RNA
gggggagguagcuaauucuccu

SEQ ID NO: 40378 - RNA, 22 nt, Artificial Sequence
  GATA2 Guide RNA
gggggucgaggugggcguggga

SEQ ID NO: 40379 - RNA, 22 nt, Artificial Sequence
  GATA2 Guide RNA
ggggguggagcgagggucaggg

SEQ ID NO: 40380 - RNA, 22 nt, Artificial Sequence
  GATA2 Guide RNA
ggggucgaggugggcgugggag

SEQ ID NO: 40381 - RNA, 22 nt, Artificial Sequence
  GATA2 Guide RNA
gggguggagcgagggucaggga

SEQ ID NO: 40382 - RNA, 22 nt, Artificial Sequence
  GATA2 Guide RNA
ggguaguugggggagguagcua

SEQ ID NO: 40383 - RNA, 22 nt, Artificial Sequence
  GATA2 Guide RNA
gggucagggaggggggucgagg

SEQ ID NO: 40384 - RNA, 22 nt, Artificial Sequence
  GATA2 Guide RNA
gggucgaggugggcgugggagu

SEQ ID NO: 40385 - RNA, 22 nt, Artificial Sequence
  GATA2 Guide RNA
ggguggagcgagggucagggag

SEQ ID NO: 40386 - RNA, 22 nt, Artificial Sequence
  GATA2 Guide RNA
gguagcuaauucuccucuguag

SEQ ID NO: 40387 - RNA, 22 nt, Artificial Sequence
  GATA2 Guide RNA
gguaguugggggagguagcuaa

SEQ ID NO: 40388 - RNA, 22 nt, Artificial Sequence
  GATA2 Guide RNA
ggucagggaggggggucgaggu

SEQ ID NO: 40389 - RNA, 22 nt, Artificial Sequence
  GATA2 Guide RNA
ggucgaggugggcgugggaguc

SEQ ID NO: 40390 - RNA, 22 nt, Artificial Sequence
  GATA2 Guide RNA
gguggagcgagggucagggagg

SEQ ID NO: 40391 - RNA, 22 nt, Artificial Sequence
  GATA2 Guide RNA
ggugggcgugggaguccagccu

SEQ ID NO: 40392 - RNA, 22 nt, Artificial Sequence
  GATA2 Guide RNA
gguggggacuggggguggagcg

SEQ ID NO: 40393 - RNA, 22 nt, Artificial Sequence
  GATA2 Guide RNA
gguucugagaugcuuugauucc

SEQ ID NO: 40394 - RNA, 22 nt, Artificial Sequence
  GATA2 Guide RNA
guagcuaauucuccucuguagc

SEQ ID NO: 40395 - RNA, 22 nt, Artificial Sequence
  GATA2 Guide RNA
guaguugggggagguagcuaau

SEQ ID NO: 40396 - RNA, 22 nt, Artificial Sequence
  GATA2 Guide RNA
gucaagacucacagaacuuugg

SEQ ID NO: 40397 - RNA, 22 nt, Artificial Sequence
  GATA2 Guide RNA
gucaaggagggcuaaaucucac

SEQ ID NO: 40398 - RNA, 22 nt, Artificial Sequence
  GATA2 Guide RNA
gucagggaggggggucgaggug

SEQ ID NO: 40399 - RNA, 22 nt, Artificial Sequence
  GATA2 Guide RNA
guccccaccagcucagucaagg

SEQ ID NO: 40400 - RNA, 22 nt, Artificial Sequence
  GATA2 Guide RNA
gucgaggugggcgugggagucc

SEQ ID NO: 40401 - RNA, 22 nt, Artificial Sequence
  GATA2 Guide RNA
gucuugacuuauuucguucuca

SEQ ID NO: 40402 - RNA, 22 nt, Artificial Sequence
  GATA2 Guide RNA
gugagauuuagcccuccuugac

SEQ ID NO: 40403 - RNA, 22 nt, Artificial Sequence
  GATA2 Guide RNA
gugagucuugacuuauuucguu

SEQ ID NO: 40404 - RNA, 22 nt, Artificial Sequence
  GATA2 Guide RNA
guggagcgagggucagggaggg

SEQ ID NO: 40405 - RNA, 22 nt, Artificial Sequence
  GATA2 Guide RNA
gugggcgugggaguccagccug

SEQ ID NO: 40406 - RNA, 22 nt, Artificial Sequence
  GATA2 Guide RNA
guggggacuggggguggagcga

SEQ ID NO: 40407 - RNA, 22 nt, Artificial Sequence
  GATA2 Guide RNA
guuagagcgcaggguaguuggg

SEQ ID NO: 40408 - RNA, 22 nt, Artificial Sequence
  GATA2 Guide RNA
guucugagaugcuuugauuccc

SEQ ID NO: 40409 - RNA, 22 nt, Artificial Sequence
  GATA2 Guide RNA
guucugugagucuugacuuauu

SEQ ID NO: 40410 - RNA, 22 nt, Artificial Sequence
  GATA2 Guide RNA
guucuuuauuccaaaguucugu

SEQ ID NO: 40411 - RNA, 22 nt, Artificial Sequence
  GATA2 Guide RNA
guugggggagguagcuaauucu

SEQ ID NO: 40412 - RNA, 22 nt, Artificial Sequence
  GATA2 Guide RNA
uaaaauuccaugguucugagau

SEQ ID NO: 40413 - RNA, 22 nt, Artificial Sequence
  GATA2 Guide RNA
uaaagaacucucagaagccuga

SEQ ID NO: 40414 - RNA, 22 nt, Artificial Sequence
  GATA2 Guide RNA
uaaaucucacaugggaaucaaa

SEQ ID NO: 40415 - RNA, 22 nt, Artificial Sequence
  GATA2 Guide RNA
uaacaucaggcuucugagaguu

SEQ ID NO: 40416 - RNA, 22 nt, Artificial Sequence
  GATA2 Guide RNA
uaagucaagacucacagaacuu

SEQ ID NO: 40417 - RNA, 22 nt, Artificial Sequence
  GATA2 Guide RNA
uaauucuccucuguagcucuug

SEQ ID NO: 40418 - RNA, 22 nt, Artificial Sequence
  GATA2 Guide RNA
uacagaggagaauuagcuaccu

SEQ ID NO: 40419 - RNA, 22 nt, Artificial Sequence
  GATA2 Guide RNA
uacccugcgcucuaacuccaua

SEQ ID NO: 40420 - RNA, 22 nt, Artificial Sequence
  GATA2 Guide RNA
uaccucccccaacuacccugcg

SEQ ID NO: 40421 - RNA, 22 nt, Artificial Sequence
  GATA2 Guide RNA
uagagcgcaggguaguuggggg

SEQ ID NO: 40422 - RNA, 22 nt, Artificial Sequence
  GATA2 Guide RNA
uagcccuccuugacugagcugg

SEQ ID NO: 40423 - RNA, 22 nt, Artificial Sequence
  GATA2 Guide RNA
uagcuaauucuccucuguagcu

SEQ ID NO: 40424 - RNA, 22 nt, Artificial Sequence
  GATA2 Guide RNA
uagcuaccucccccaacuaccc

SEQ ID NO: 40425 - RNA, 22 nt, Artificial Sequence
  GATA2 Guide RNA
uaguugggggagguagcuaauu

SEQ ID NO: 40426 - RNA, 22 nt, Artificial Sequence
  GATA2 Guide RNA
uauggaguuagagcgcagggua

SEQ ID NO: 40427 - RNA, 22 nt, Artificial Sequence
  GATA2 Guide RNA
uauuccaaaguucugugagucu

SEQ ID NO: 40428 - RNA, 22 nt, Artificial Sequence
  GATA2 Guide RNA
ucaaagcaucucagaaccaugg

SEQ ID NO: 40429 - RNA, 22 nt, Artificial Sequence
  GATA2 Guide RNA
ucaacgggauugcaagagcuac

SEQ ID NO: 40430 - RNA, 22 nt, Artificial Sequence
  GATA2 Guide RNA
ucaagacucacagaacuuugga

SEQ ID NO: 40431 - RNA, 22 nt, Artificial Sequence
  GATA2 Guide RNA
ucaaggagggcuaaaucucaca

SEQ ID NO: 40432 - RNA, 22 nt, Artificial Sequence
  GATA2 Guide RNA
ucacagaacuuuggaauaaaga

SEQ ID NO: 40433 - RNA, 22 nt, Artificial Sequence
  GATA2 Guide RNA
ucacaugggaaucaaagcaucu

SEQ ID NO: 40434 - RNA, 22 nt, Artificial Sequence
  GATA2 Guide RNA
ucagaaccauggaauuuuagaa

SEQ ID NO: 40435 - RNA, 22 nt, Artificial Sequence
  GATA2 Guide RNA
ucagcaggcuggacucccacgc

SEQ ID NO: 40436 - RNA, 22 nt, Artificial Sequence
  GATA2 Guide RNA
ucaggcuucugagaguucuuua

SEQ ID NO: 40437 - RNA, 22 nt, Artificial Sequence
  GATA2 Guide RNA
ucagggaggggggucgaggugg

SEQ ID NO: 40438 - RNA, 22 nt, Artificial Sequence
  GATA2 Guide RNA
ucagucaaggagggcuaaaucu

SEQ ID NO: 40439 - RNA, 22 nt, Artificial Sequence
  GATA2 Guide RNA
uccaaaguucugugagucuuga

SEQ ID NO: 40440 - RNA, 22 nt, Artificial Sequence
  GATA2 Guide RNA
uccacccccaguccccaccagc

SEQ ID NO: 40441 - RNA, 22 nt, Artificial Sequence
  GATA2 Guide RNA
uccaugguucugagaugcuuug

SEQ ID NO: 40442 - RNA, 22 nt, Artificial Sequence
  GATA2 Guide RNA
ucccacgcccaccucgaccccc

SEQ ID NO: 40443 - RNA, 22 nt, Artificial Sequence
  GATA2 Guide RNA
ucccaugugagauuuagcccuc

SEQ ID NO: 40444 - RNA, 22 nt, Artificial Sequence
  GATA2 Guide RNA
uccccaccagcucagucaagga

SEQ ID NO: 40445 - RNA, 22 nt, Artificial Sequence
  GATA2 Guide RNA
uccccauuuauggaguuagagc

SEQ ID NO: 40446 - RNA, 22 nt, Artificial Sequence
  GATA2 Guide RNA
ucccccaacuacccugcgcucu

SEQ ID NO: 40447 - RNA, 22 nt, Artificial Sequence
  GATA2 Guide RNA
ucccugacccucgcuccacccc

SEQ ID NO: 40448 - RNA, 22 nt, Artificial Sequence
  GATA2 Guide RNA
uccucuguagcucuugcaaucc

SEQ ID NO: 40449 - RNA, 22 nt, Artificial Sequence
  GATA2 Guide RNA
uccuugacugagcuggugggga

SEQ ID NO: 40450 - RNA, 22 nt, Artificial Sequence
  GATA2 Guide RNA
ucgaccccccucccugacccuc

SEQ ID NO: 40451 - RNA, 22 nt, Artificial Sequence
  GATA2 Guide RNA
ucgaggugggcgugggagucca

SEQ ID NO: 40452 - RNA, 22 nt, Artificial Sequence
  GATA2 Guide RNA
ucgcuccacccccaguccccac

SEQ ID NO: 40453 - RNA, 22 nt, Artificial Sequence
  GATA2 Guide RNA
ucuaaaauuccaugguucugag

SEQ ID NO: 40454 - RNA, 22 nt, Artificial Sequence
  GATA2 Guide RNA
ucuaacaucaggcuucugagag

SEQ ID NO: 40455 - RNA, 22 nt, Artificial Sequence
  GATA2 Guide RNA
ucucacaugggaaucaaagcau

SEQ ID NO: 40456 - RNA, 22 nt, Artificial Sequence
  GATA2 Guide RNA
ucucagaaccauggaauuuuag

SEQ ID NO: 40457 - RNA, 22 nt, Artificial Sequence
  GATA2 Guide RNA
ucuccucuguagcucuugcaau

SEQ ID NO: 40458 - RNA, 22 nt, Artificial Sequence
  GATA2 Guide RNA
ucugagaguucuuuauuccaaa

SEQ ID NO: 40459 - RNA, 22 nt, Artificial Sequence
  GATA2 Guide RNA
ucugagaugcuuugauucccau

SEQ ID NO: 40460 - RNA, 22 nt, Artificial Sequence
  GATA2 Guide RNA
ucugugagucuugacuuauuuc

SEQ ID NO: 40461 - RNA, 22 nt, Artificial Sequence
  GATA2 Guide RNA
ucuugacuuauuucguucucaa

SEQ ID NO: 40462 - RNA, 22 nt, Artificial Sequence
  GATA2 Guide RNA
ucuuuauuccaaaguucuguga

SEQ ID NO: 40463 - RNA, 22 nt, Artificial Sequence
  GATA2 Guide RNA
ugacccucgcuccacccccagu

SEQ ID NO: 40464 - RNA, 22 nt, Artificial Sequence
  GATA2 Guide RNA
ugacugagcugguggggacugg

SEQ ID NO: 40465 - RNA, 22 nt, Artificial Sequence
  GATA2 Guide RNA
ugagaacgaaauaagucaagac

SEQ ID NO: 40466 - RNA, 22 nt, Artificial Sequence
  GATA2 Guide RNA
ugagaguucuuuauuccaaagu

SEQ ID NO: 40467 - RNA, 22 nt, Artificial Sequence
  GATA2 Guide RNA
ugagaugcuuugauucccaugu

SEQ ID NO: 40468 - RNA, 22 nt, Artificial Sequence
  GATA2 Guide RNA
ugagauuuagcccuccuugacu

SEQ ID NO: 40469 - RNA, 22 nt, Artificial Sequence
  GATA2 Guide RNA
ugagcugguggggacugggggu

SEQ ID NO: 40470 - RNA, 22 nt, Artificial Sequence
  GATA2 Guide RNA
ugagucuugacuuauuucguuc

SEQ ID NO: 40471 - RNA, 22 nt, Artificial Sequence
  GATA2 Guide RNA
ugauucccaugugagauuuagc

SEQ ID NO: 40472 - RNA, 22 nt, Artificial Sequence
  GATA2 Guide RNA
ugcaagagcuacagaggagaau

SEQ ID NO: 40473 - RNA, 22 nt, Artificial Sequence
  GATA2 Guide RNA
ugcuuugauucccaugugagau

SEQ ID NO: 40474 - RNA, 22 nt, Artificial Sequence
  GATA2 Guide RNA
uggaauaaagaacucucagaag

SEQ ID NO: 40475 - RNA, 22 nt, Artificial Sequence
  GATA2 Guide RNA
uggacucccacgcccaccucga

SEQ ID NO: 40476 - RNA, 22 nt, Artificial Sequence
  GATA2 Guide RNA
uggagcgagggucagggagggg

SEQ ID NO: 40477 - RNA, 22 nt, Artificial Sequence
  GATA2 Guide RNA
uggaguuagagcgcaggguagu

SEQ ID NO: 40478 - RNA, 22 nt, Artificial Sequence
  GATA2 Guide RNA
ugggaaucaaagcaucucagaa

SEQ ID NO: 40479 - RNA, 22 nt, Artificial Sequence
  GATA2 Guide RNA
uggggacuggggguggagcgag

SEQ ID NO: 40480 - RNA, 22 nt, Artificial Sequence
  GATA2 Guide RNA
ugggggagguagcuaauucucc

SEQ ID NO: 40481 - RNA, 22 nt, Artificial Sequence
  GATA2 Guide RNA
uggggguggagcgagggucagg

SEQ ID NO: 40482 - RNA, 22 nt, Artificial Sequence
  GATA2 Guide RNA
ugguggggacuggggguggagc

SEQ ID NO: 40483 - RNA, 22 nt, Artificial Sequence
  GATA2 Guide RNA
ugguucugagaugcuuugauuc

SEQ ID NO: 40484 - RNA, 22 nt, Artificial Sequence
  GATA2 Guide RNA
ugugagauuuagcccuccuuga

SEQ ID NO: 40485 - RNA, 22 nt, Artificial Sequence
  GATA2 Guide RNA
ugugagucuugacuuauuucgu

SEQ ID NO: 40486 - RNA, 22 nt, Artificial Sequence
  GATA2 Guide RNA
uuagagcgcaggguaguugggg

SEQ ID NO: 40487 - RNA, 22 nt, Artificial Sequence
  GATA2 Guide RNA
uuagcccuccuugacugagcug

SEQ ID NO: 40488 - RNA, 22 nt, Artificial Sequence
  GATA2 Guide RNA
uuagcuaccucccccaacuacc

SEQ ID NO: 40489 - RNA, 22 nt, Artificial Sequence
  GATA2 Guide RNA
uuauggaguuagagcgcagggu

SEQ ID NO: 40490 - RNA, 22 nt, Artificial Sequence
  GATA2 Guide RNA
uuauuccaaaguucugugaguc

SEQ ID NO: 40491 - RNA, 22 nt, Artificial Sequence
  GATA2 Guide RNA
uuccaaaguucugugagucuug

SEQ ID NO: 40492 - RNA, 22 nt, Artificial Sequence
  GATA2 Guide RNA
uuccaugguucugagaugcuuu

SEQ ID NO: 40493 - RNA, 22 nt, Artificial Sequence
  GATA2 Guide RNA
uucccaugugagauuuagcccu

SEQ ID NO: 40494 - RNA, 22 nt, Artificial Sequence
  GATA2 Guide RNA
uucuaaaauuccaugguucuga

SEQ ID NO: 40495 - RNA, 22 nt, Artificial Sequence
  GATA2 Guide RNA
uucuaacaucaggcuucugaga

SEQ ID NO: 40496 - RNA, 22 nt, Artificial Sequence
  GATA2 Guide RNA
uucuccucuguagcucuugcaa

SEQ ID NO: 40497 - RNA, 22 nt, Artificial Sequence
  GATA2 Guide RNA
uucugagaguucuuuauuccaa

SEQ ID NO: 40498 - RNA, 22 nt, Artificial Sequence
  GATA2 Guide RNA
uucugagaugcuuugauuccca

SEQ ID NO: 40499 - RNA, 22 nt, Artificial Sequence
  GATA2 Guide RNA
uucugugagucuugacuuauuu

SEQ ID NO: 40500 - RNA, 22 nt, Artificial Sequence
  GATA2 Guide RNA
uucuuuauuccaaaguucugug

SEQ ID NO: 40501 - RNA, 22 nt, Artificial Sequence
  GATA2 Guide RNA
uugacugagcugguggggacug

SEQ ID NO: 40502 - RNA, 22 nt, Artificial Sequence
  GATA2 Guide RNA
uugagaacgaaauaagucaaga

SEQ ID NO: 40503 - RNA, 22 nt, Artificial Sequence
  GATA2 Guide RNA
uugauucccaugugagauuuag

SEQ ID NO: 40504 - RNA, 22 nt, Artificial Sequence
  GATA2 Guide RNA
uugcaagagcuacagaggagaa

SEQ ID NO: 40505 - RNA, 22 nt, Artificial Sequence
  GATA2 Guide RNA
uuggaauaaagaacucucagaa

SEQ ID NO: 40506 - RNA, 22 nt, Artificial Sequence
  GATA2 Guide RNA
uugggggagguagcuaauucuc

SEQ ID NO: 40507 - RNA, 22 nt, Artificial Sequence
  GATA2 Guide RNA
uuuagcccuccuugacugagcu

SEQ ID NO: 40508 - RNA, 22 nt, Artificial Sequence
  GATA2 Guide RNA
uuuauggaguuagagcgcaggg

SEQ ID NO: 40509 - RNA, 22 nt, Artificial Sequence
  GATA2 Guide RNA
uuuauuccaaaguucugugagu

SEQ ID NO: 40510 - RNA, 22 nt, Artificial Sequence
  GATA2 Guide RNA
uuugagaacgaaauaagucaag

SEQ ID NO: 40511 - RNA, 22 nt, Artificial Sequence
  GATA2 Guide RNA
uuugauucccaugugagauuua

SEQ ID NO: 40512 - RNA, 22 nt, Artificial Sequence
  GATA2 Guide RNA
uuuggaauaaagaacucucaga

SEQ ID NO: 40513 - RNA, 20 nt, Artificial Sequence
  GATA2 Guide RNA
aaaaaacuccuucaaaugca

SEQ ID NO: 40514 - RNA, 20 nt, Artificial Sequence
  GATA2 Guide RNA
aaaaaagagcuaagcagagg

SEQ ID NO: 40515 - RNA, 20 nt, Artificial Sequence
  GATA2 Guide RNA
aaaaacuccuucaaaugcag

SEQ ID NO: 40516 - RNA, 20 nt, Artificial Sequence
  GATA2 Guide RNA
aaaaagagcuaagcagaggc

SEQ ID NO: 40517 - RNA, 20 nt, Artificial Sequence
  GATA2 Guide RNA
aaaaauagggccaugaagua

SEQ ID NO: 40518 - RNA, 20 nt, Artificial Sequence
  GATA2 Guide RNA
aaaacuccuucaaaugcaga

SEQ ID NO: 40519 - RNA, 20 nt, Artificial Sequence
  GATA2 Guide RNA
aaaagagcuaagcagaggcc

SEQ ID NO: 40520 - RNA, 20 nt, Artificial Sequence
  GATA2 Guide RNA
aaaagaggauuucaagcggc

SEQ ID NO: 40521 - RNA, 20 nt, Artificial Sequence
  GATA2 Guide RNA
aaaagcacugggaugucagu

SEQ ID NO: 40522 - RNA, 20 nt, Artificial Sequence
  GATA2 Guide RNA
aaaaguacuucauggcccua

SEQ ID NO: 40523 - RNA, 20 nt, Artificial Sequence
  GATA2 Guide RNA
aaaauagggccaugaaguac

SEQ ID NO: 40524 - RNA, 20 nt, Artificial Sequence
  GATA2 Guide RNA
aaacuccuucaaaugcagac

SEQ ID NO: 40525 - RNA, 20 nt, Artificial Sequence
  GATA2 Guide RNA
aaagaaucuggccagaaaga

SEQ ID NO: 40526 - RNA, 20 nt, Artificial Sequence
  GATA2 Guide RNA
aaagagagacgaccccaacu

SEQ ID NO: 40527 - RNA, 20 nt, Artificial Sequence
  GATA2 Guide RNA
aaagagcuaagcagaggcca

SEQ ID NO: 40528 - RNA, 20 nt, Artificial Sequence
  GATA2 Guide RNA
aaagaggauuucaagcggca

SEQ ID NO: 40529 - RNA, 20 nt, Artificial Sequence
  GATA2 Guide RNA
aaagcacugggaugucaguu

SEQ ID NO: 40530 - RNA, 20 nt, Artificial Sequence
  GATA2 Guide RNA
aaagcgucugcauuugaagg

SEQ ID NO: 40531 - RNA, 20 nt, Artificial Sequence
  GATA2 Guide RNA
aaaguacuucauggcccuau

SEQ ID NO: 40532 - RNA, 20 nt, Artificial Sequence
  GATA2 Guide RNA
aaaucuggcccgaaagaauc

SEQ ID NO: 40533 - RNA, 20 nt, Artificial Sequence
  GATA2 Guide RNA
aaaugcagacgcuuugccgc

SEQ ID NO: 40534 - RNA, 20 nt, Artificial Sequence
  GATA2 Guide RNA
aaccgccagcuccugcccag

SEQ ID NO: 40535 - RNA, 20 nt, Artificial Sequence
  GATA2 Guide RNA
aacuccuucaaaugcagacg

SEQ ID NO: 40536 - RNA, 20 nt, Artificial Sequence
  GATA2 Guide RNA
aacugacaucccagugcuuu

SEQ ID NO: 40537 - RNA, 20 nt, Artificial Sequence
  GATA2 Guide RNA
aacuucggggaucccggagc

SEQ ID NO: 40538 - RNA, 20 nt, Artificial Sequence
  GATA2 Guide RNA
aagaaucuggccagaaagag

SEQ ID NO: 40539 - RNA, 20 nt, Artificial Sequence
  GATA2 Guide RNA
aagagagacgaccccaacug

SEQ ID NO: 40540 - RNA, 20 nt, Artificial Sequence
  GATA2 Guide RNA
aagagcuaagcagaggccag

SEQ ID NO: 40541 - RNA, 20 nt, Artificial Sequence
  GATA2 Guide RNA
aagaggauuucaagcggcaa

SEQ ID NO: 40542 - RNA, 20 nt, Artificial Sequence
  GATA2 Guide RNA
aagcacugggaugucaguug

SEQ ID NO: 40543 - RNA, 20 nt, Artificial Sequence
  GATA2 Guide RNA
aagcagaggccagaggacag

SEQ ID NO: 40544 - RNA, 20 nt, Artificial Sequence
  GATA2 Guide RNA
aagcggcaaagcgucugcau

SEQ ID NO: 40545 - RNA, 20 nt, Artificial Sequence
  GATA2 Guide RNA
aagcgucugcauuugaagga

SEQ ID NO: 40546 - RNA, 20 nt, Artificial Sequence
  GATA2 Guide RNA
aagggugcccggugggcucc

SEQ ID NO: 40547 - RNA, 20 nt, Artificial Sequence
  GATA2 Guide RNA
aaguacuucauggcccuauu

SEQ ID NO: 40548 - RNA, 20 nt, Artificial Sequence
  GATA2 Guide RNA
aaguugaguguccacgggcc

SEQ ID NO: 40549 - RNA, 20 nt, Artificial Sequence
  GATA2 Guide RNA
aaucuggccagaaagagaga

SEQ ID NO: 40550 - RNA, 20 nt, Artificial Sequence
  GATA2 Guide RNA
aaucuggcccgaaagaaucu

SEQ ID NO: 40551 - RNA, 20 nt, Artificial Sequence
  GATA2 Guide RNA
aaugcagacgcuuugccgcu

SEQ ID NO: 40552 - RNA, 20 nt, Artificial Sequence
  GATA2 Guide RNA
aauuaaccgccagcuccugc

SEQ ID NO: 40553 - RNA, 20 nt, Artificial Sequence
  GATA2 Guide RNA
acacucaacuucggggaucc

SEQ ID NO: 40554 - RNA, 20 nt, Artificial Sequence
  GATA2 Guide RNA
acaggaguccggcccgugga

SEQ ID NO: 40555 - RNA, 20 nt, Artificial Sequence
  GATA2 Guide RNA
acaucccagugcuuuucaug

SEQ ID NO: 40556 - RNA, 20 nt, Artificial Sequence
  GATA2 Guide RNA
accccaacugacaucccagu

SEQ ID NO: 40557 - RNA, 20 nt, Artificial Sequence
  GATA2 Guide RNA
accccacucugcuccgggau

SEQ ID NO: 40558 - RNA, 20 nt, Artificial Sequence
  GATA2 Guide RNA
acccgaggaggaaaucuggc

SEQ ID NO: 40559 - RNA, 20 nt, Artificial Sequence
  GATA2 Guide RNA
acccuugcgccaccccacuc

SEQ ID NO: 40560 - RNA, 20 nt, Artificial Sequence
  GATA2 Guide RNA
accgccagcuccugcccagc

SEQ ID NO: 40561 - RNA, 20 nt, Artificial Sequence
  GATA2 Guide RNA
accgggcacccuugcgccac

SEQ ID NO: 40562 - RNA, 20 nt, Artificial Sequence
  GATA2 Guide RNA
acgaccccaacugacauccc

SEQ ID NO: 40563 - RNA, 20 nt, Artificial Sequence
  GATA2 Guide RNA
acgcuuugccgcuugaaauc

SEQ ID NO: 40564 - RNA, 20 nt, Artificial Sequence
  GATA2 Guide RNA
acgggccggacuccuguccu

SEQ ID NO: 40565 - RNA, 20 nt, Artificial Sequence
  GATA2 Guide RNA
acucaacuucggggaucccg

SEQ ID NO: 40566 - RNA, 20 nt, Artificial Sequence
  GATA2 Guide RNA
acuccuguccucuggccucu

SEQ ID NO: 40567 - RNA, 20 nt, Artificial Sequence
  GATA2 Guide RNA
acuccuucaaaugcagacgc

SEQ ID NO: 40568 - RNA, 20 nt, Artificial Sequence
  GATA2 Guide RNA
acucugcuccgggauccccg

SEQ ID NO: 40569 - RNA, 20 nt, Artificial Sequence
  GATA2 Guide RNA
acugacaucccagugcuuuu

SEQ ID NO: 40570 - RNA, 20 nt, Artificial Sequence
  GATA2 Guide RNA
acugggaugucaguuggggu

SEQ ID NO: 40571 - RNA, 20 nt, Artificial Sequence
  GATA2 Guide RNA
acuucauggcccuauuuuua

SEQ ID NO: 40572 - RNA, 20 nt, Artificial Sequence
  GATA2 Guide RNA
acuucggggaucccggagca

SEQ ID NO: 40573 - RNA, 20 nt, Artificial Sequence
  GATA2 Guide RNA
agaaagagagacgaccccaa

SEQ ID NO: 40574 - RNA, 20 nt, Artificial Sequence
  GATA2 Guide RNA
agaaucuggccagaaagaga

SEQ ID NO: 40575 - RNA, 20 nt, Artificial Sequence
  GATA2 Guide RNA
agacgaccccaacugacauc

SEQ ID NO: 40576 - RNA, 20 nt, Artificial Sequence
  GATA2 Guide RNA
agacgcuuugccgcuugaaa

SEQ ID NO: 40577 - RNA, 20 nt, Artificial Sequence
  GATA2 Guide RNA
agagacgaccccaacugaca

SEQ ID NO: 40578 - RNA, 20 nt, Artificial Sequence
  GATA2 Guide RNA
agagagacgaccccaacuga

SEQ ID NO: 40579 - RNA, 20 nt, Artificial Sequence
  GATA2 Guide RNA
agagcuaagcagaggccaga

SEQ ID NO: 40580 - RNA, 20 nt, Artificial Sequence
  GATA2 Guide RNA
agaggacaggaguccggccc

SEQ ID NO: 40581 - RNA, 20 nt, Artificial Sequence
  GATA2 Guide RNA
agaggauuucaagcggcaaa

SEQ ID NO: 40582 - RNA, 20 nt, Artificial Sequence
  GATA2 Guide RNA
agaggccagaggacaggagu

SEQ ID NO: 40583 - RNA, 20 nt, Artificial Sequence
  GATA2 Guide RNA
agagugggguggcgcaaggg

SEQ ID NO: 40584 - RNA, 20 nt, Artificial Sequence
  GATA2 Guide RNA
agauucuuucgggccagauu

SEQ ID NO: 40585 - RNA, 20 nt, Artificial Sequence
  GATA2 Guide RNA
agauuuccuccucggguaua

SEQ ID NO: 40586 - RNA, 20 nt, Artificial Sequence
  GATA2 Guide RNA
agcacugggaugucaguugg

SEQ ID NO: 40587 - RNA, 20 nt, Artificial Sequence
  GATA2 Guide RNA
agcagaggccagaggacagg

SEQ ID NO: 40588 - RNA, 20 nt, Artificial Sequence
  GATA2 Guide RNA
agcagagugggguggcgcaa

SEQ ID NO: 40589 - RNA, 20 nt, Artificial Sequence
  GATA2 Guide RNA
agcccaccgggcacccuugc

SEQ ID NO: 40590 - RNA, 20 nt, Artificial Sequence
  GATA2 Guide RNA
agcggcaaagcgucugcauu

SEQ ID NO: 40591 - RNA, 20 nt, Artificial Sequence
  GATA2 Guide RNA
agcgucugcauuugaaggag

SEQ ID NO: 40592 - RNA, 20 nt, Artificial Sequence
  GATA2 Guide RNA
agcuaagcagaggccagagg

SEQ ID NO: 40593 - RNA, 20 nt, Artificial Sequence
  GATA2 Guide RNA
agcuggcgguuaauuacagg

SEQ ID NO: 40594 - RNA, 20 nt, Artificial Sequence
  GATA2 Guide RNA
aggaaaucuggcccgaaaga

SEQ ID NO: 40595 - RNA, 20 nt, Artificial Sequence
  GATA2 Guide RNA
aggacaggaguccggcccgu

SEQ ID NO: 40596 - RNA, 20 nt, Artificial Sequence
  GATA2 Guide RNA
aggagcuggcgguuaauuac

SEQ ID NO: 40597 - RNA, 20 nt, Artificial Sequence
  GATA2 Guide RNA
aggaggaaaucuggcccgaa

SEQ ID NO: 40598 - RNA, 20 nt, Artificial Sequence
  GATA2 Guide RNA
aggaguccggcccguggaca

SEQ ID NO: 40599 - RNA, 20 nt, Artificial Sequence
  GATA2 Guide RNA
aggauuucaagcggcaaagc

SEQ ID NO: 40600 - RNA, 20 nt, Artificial Sequence
  GATA2 Guide RNA
aggccagaggacaggagucc

SEQ ID NO: 40601 - RNA, 20 nt, Artificial Sequence
  GATA2 Guide RNA
agggagcccaccgggcaccc

SEQ ID NO: 40602 - RNA, 20 nt, Artificial Sequence
  GATA2 Guide RNA
agggugcccggugggcuccc

SEQ ID NO: 40603 - RNA, 20 nt, Artificial Sequence
  GATA2 Guide RNA
aguacuucauggcccuauuu

SEQ ID NO: 40604 - RNA, 20 nt, Artificial Sequence
  GATA2 Guide RNA
aguccggcccguggacacuc

SEQ ID NO: 40605 - RNA, 20 nt, Artificial Sequence
  GATA2 Guide RNA
agugcuuuucaugauaaaag

SEQ ID NO: 40606 - RNA, 20 nt, Artificial Sequence
  GATA2 Guide RNA
agugggguggcgcaagggug

SEQ ID NO: 40607 - RNA, 20 nt, Artificial Sequence
  GATA2 Guide RNA
aguguccacgggccggacuc

SEQ ID NO: 40608 - RNA, 20 nt, Artificial Sequence
  GATA2 Guide RNA
aguugaguguccacgggccg

SEQ ID NO: 40609 - RNA, 20 nt, Artificial Sequence
  GATA2 Guide RNA
aguuggggucgucucucuuu

SEQ ID NO: 40610 - RNA, 20 nt, Artificial Sequence
  GATA2 Guide RNA
auaaaagaggauuucaagcg

SEQ ID NO: 40611 - RNA, 20 nt, Artificial Sequence
  GATA2 Guide RNA
auacccgaggaggaaaucug

SEQ ID NO: 40612 - RNA, 20 nt, Artificial Sequence
  GATA2 Guide RNA
auagggagcccaccgggcac

SEQ ID NO: 40613 - RNA, 20 nt, Artificial Sequence
  GATA2 Guide RNA
aucaugaaaagcacugggau

SEQ ID NO: 40614 - RNA, 20 nt, Artificial Sequence
  GATA2 Guide RNA
aucccagugcuuuucaugau

SEQ ID NO: 40615 - RNA, 20 nt, Artificial Sequence
  GATA2 Guide RNA
auccccgaaguugagugucc

SEQ ID NO: 40616 - RNA, 20 nt, Artificial Sequence
  GATA2 Guide RNA
aucccggagcagaguggggu

SEQ ID NO: 40617 - RNA, 20 nt, Artificial Sequence
  GATA2 Guide RNA
aucuggccagaaagagagac

SEQ ID NO: 40618 - RNA, 20 nt, Artificial Sequence
  GATA2 Guide RNA
aucuggcccgaaagaaucug

SEQ ID NO: 40619 - RNA, 20 nt, Artificial Sequence
  GATA2 Guide RNA
augaaaagcacugggauguc

SEQ ID NO: 40620 - RNA, 20 nt, Artificial Sequence
  GATA2 Guide RNA
augcagacgcuuugccgcuu

SEQ ID NO: 40621 - RNA, 20 nt, Artificial Sequence
  GATA2 Guide RNA
augucaguuggggucgucuc

SEQ ID NO: 40622 - RNA, 20 nt, Artificial Sequence
  GATA2 Guide RNA
auuaaccgccagcuccugcc

SEQ ID NO: 40623 - RNA, 20 nt, Artificial Sequence
  GATA2 Guide RNA
auucuuucgggccagauuuc

SEQ ID NO: 40624 - RNA, 20 nt, Artificial Sequence
  GATA2 Guide RNA
auuucaagcggcaaagcguc

SEQ ID NO: 40625 - RNA, 20 nt, Artificial Sequence
  GATA2 Guide RNA
auuuccuccucggguauagg

SEQ ID NO: 40626 - RNA, 20 nt, Artificial Sequence
  GATA2 Guide RNA
caaagcgucugcauuugaag

SEQ ID NO: 40627 - RNA, 20 nt, Artificial Sequence
  GATA2 Guide RNA
caaaugcagacgcuuugccg

SEQ ID NO: 40628 - RNA, 20 nt, Artificial Sequence
  GATA2 Guide RNA
caacugacaucccagugcuu

SEQ ID NO: 40629 - RNA, 20 nt, Artificial Sequence
  GATA2 Guide RNA
caacuucggggaucccggag

SEQ ID NO: 40630 - RNA, 20 nt, Artificial Sequence
  GATA2 Guide RNA
caagcggcaaagcgucugca

SEQ ID NO: 40631 - RNA, 20 nt, Artificial Sequence
  GATA2 Guide RNA
caagggugcccggugggcuc

SEQ ID NO: 40632 - RNA, 20 nt, Artificial Sequence
  GATA2 Guide RNA
caccccacucugcuccggga

SEQ ID NO: 40633 - RNA, 20 nt, Artificial Sequence
  GATA2 Guide RNA
cacccuugcgccaccccacu

SEQ ID NO: 40634 - RNA, 20 nt, Artificial Sequence
  GATA2 Guide RNA
caccgggcacccuugcgcca

SEQ ID NO: 40635 - RNA, 20 nt, Artificial Sequence
  GATA2 Guide RNA
cacgggccggacuccugucc

SEQ ID NO: 40636 - RNA, 20 nt, Artificial Sequence
  GATA2 Guide RNA
cacucaacuucggggauccc

SEQ ID NO: 40637 - RNA, 20 nt, Artificial Sequence
  GATA2 Guide RNA
cacucugcuccgggaucccc

SEQ ID NO: 40638 - RNA, 20 nt, Artificial Sequence
  GATA2 Guide RNA
cacugggaugucaguugggg

SEQ ID NO: 40639 - RNA, 20 nt, Artificial Sequence
  GATA2 Guide RNA
cagaaagagagacgacccca

SEQ ID NO: 40640 - RNA, 20 nt, Artificial Sequence
  GATA2 Guide RNA
cagacgcuuugccgcuugaa

SEQ ID NO: 40641 - RNA, 20 nt, Artificial Sequence
  GATA2 Guide RNA
cagaggacaggaguccggcc

SEQ ID NO: 40642 - RNA, 20 nt, Artificial Sequence
  GATA2 Guide RNA
cagaggccagaggacaggag

SEQ ID NO: 40643 - RNA, 20 nt, Artificial Sequence
  GATA2 Guide RNA
cagagugggguggcgcaagg

SEQ ID NO: 40644 - RNA, 20 nt, Artificial Sequence
  GATA2 Guide RNA
cagauucuuucgggccagau

SEQ ID NO: 40645 - RNA, 20 nt, Artificial Sequence
  GATA2 Guide RNA
cagauuuccuccucggguau

SEQ ID NO: 40646 - RNA, 20 nt, Artificial Sequence
  GATA2 Guide RNA
caggagcuggcgguuaauua

SEQ ID NO: 40647 - RNA, 20 nt, Artificial Sequence
  GATA2 Guide RNA
caggaguccggcccguggac

SEQ ID NO: 40648 - RNA, 20 nt, Artificial Sequence
  GATA2 Guide RNA
cagugcuuuucaugauaaaa

SEQ ID NO: 40649 - RNA, 20 nt, Artificial Sequence
  GATA2 Guide RNA
caguuggggucgucucucuu

SEQ ID NO: 40650 - RNA, 20 nt, Artificial Sequence
  GATA2 Guide RNA
caucccagugcuuuucauga

SEQ ID NO: 40651 - RNA, 20 nt, Artificial Sequence
  GATA2 Guide RNA
caugaaaagcacugggaugu

SEQ ID NO: 40652 - RNA, 20 nt, Artificial Sequence
  GATA2 Guide RNA
caugauaaaagaggauuuca

SEQ ID NO: 40653 - RNA, 20 nt, Artificial Sequence
  GATA2 Guide RNA
cauggcccuauuuuuaaaaa

SEQ ID NO: 40654 - RNA, 20 nt, Artificial Sequence
  GATA2 Guide RNA
ccaacugacaucccagugcu

SEQ ID NO: 40655 - RNA, 20 nt, Artificial Sequence
  GATA2 Guide RNA
ccaccccacucugcuccggg

SEQ ID NO: 40656 - RNA, 20 nt, Artificial Sequence
  GATA2 Guide RNA
ccaccgggcacccuugcgcc

SEQ ID NO: 40657 - RNA, 20 nt, Artificial Sequence
  GATA2 Guide RNA
ccacgggccggacuccuguc

SEQ ID NO: 40658 - RNA, 20 nt, Artificial Sequence
  GATA2 Guide RNA
ccacucugcuccgggauccc

SEQ ID NO: 40659 - RNA, 20 nt, Artificial Sequence
  GATA2 Guide RNA
ccagaaagagagacgacccc

SEQ ID NO: 40660 - RNA, 20 nt, Artificial Sequence
  GATA2 Guide RNA
ccagaggacaggaguccggc

SEQ ID NO: 40661 - RNA, 20 nt, Artificial Sequence
  GATA2 Guide RNA
ccagauucuuucgggccaga

SEQ ID NO: 40662 - RNA, 20 nt, Artificial Sequence
  GATA2 Guide RNA
ccagauuuccuccucgggua

SEQ ID NO: 40663 - RNA, 20 nt, Artificial Sequence
  GATA2 Guide RNA
ccagugcuuuucaugauaaa

SEQ ID NO: 40664 - RNA, 20 nt, Artificial Sequence
  GATA2 Guide RNA
cccaacugacaucccagugc

SEQ ID NO: 40665 - RNA, 20 nt, Artificial Sequence
  GATA2 Guide RNA
cccaccgggcacccuugcgc

SEQ ID NO: 40666 - RNA, 20 nt, Artificial Sequence
  GATA2 Guide RNA
cccacucugcuccgggaucc

SEQ ID NO: 40667 - RNA, 20 nt, Artificial Sequence
  GATA2 Guide RNA
cccagugcuuuucaugauaa

SEQ ID NO: 40668 - RNA, 20 nt, Artificial Sequence
  GATA2 Guide RNA
ccccaacugacaucccagug

SEQ ID NO: 40669 - RNA, 20 nt, Artificial Sequence
  GATA2 Guide RNA
ccccacucugcuccgggauc

SEQ ID NO: 40670 - RNA, 20 nt, Artificial Sequence
  GATA2 Guide RNA
ccccgaaguugaguguccac

SEQ ID NO: 40671 - RNA, 20 nt, Artificial Sequence
  GATA2 Guide RNA
ccccuguaauuaaccgccag

SEQ ID NO: 40672 - RNA, 20 nt, Artificial Sequence
  GATA2 Guide RNA
cccgaaagaaucuggccaga

SEQ ID NO: 40673 - RNA, 20 nt, Artificial Sequence
  GATA2 Guide RNA
cccgaaguugaguguccacg

SEQ ID NO: 40674 - RNA, 20 nt, Artificial Sequence
  GATA2 Guide RNA
cccgaggaggaaaucuggcc

SEQ ID NO: 40675 - RNA, 20 nt, Artificial Sequence
  GATA2 Guide RNA
cccggagcagaguggggugg

SEQ ID NO: 40676 - RNA, 20 nt, Artificial Sequence
  GATA2 Guide RNA
cccggugggcucccuauacc

SEQ ID NO: 40677 - RNA, 20 nt, Artificial Sequence
  GATA2 Guide RNA
cccguggacacucaacuucg

SEQ ID NO: 40678 - RNA, 20 nt, Artificial Sequence
  GATA2 Guide RNA
cccuauacccgaggaggaaa

SEQ ID NO: 40679 - RNA, 20 nt, Artificial Sequence
  GATA2 Guide RNA
cccuauuuuuaaaaaagagc

SEQ ID NO: 40680 - RNA, 20 nt, Artificial Sequence
  GATA2 Guide RNA
cccuguaauuaaccgccagc

SEQ ID NO: 40681 - RNA, 20 nt, Artificial Sequence
  GATA2 Guide RNA
cccuugcgccaccccacucu

SEQ ID NO: 40682 - RNA, 20 nt, Artificial Sequence
  GATA2 Guide RNA
ccgaaagaaucuggccagaa

SEQ ID NO: 40683 - RNA, 20 nt, Artificial Sequence
  GATA2 Guide RNA
ccgaaguugaguguccacgg

SEQ ID NO: 40684 - RNA, 20 nt, Artificial Sequence
  GATA2 Guide RNA
ccgaggaggaaaucuggccc

SEQ ID NO: 40685 - RNA, 20 nt, Artificial Sequence
  GATA2 Guide RNA
ccgccagcuccugcccagca

SEQ ID NO: 40686 - RNA, 20 nt, Artificial Sequence
  GATA2 Guide RNA
ccgcuugaaauccucuuuua

SEQ ID NO: 40687 - RNA, 20 nt, Artificial Sequence
  GATA2 Guide RNA
ccggacuccuguccucuggc

SEQ ID NO: 40688 - RNA, 20 nt, Artificial Sequence
  GATA2 Guide RNA
ccggagcagagugggguggc

SEQ ID NO: 40689 - RNA, 20 nt, Artificial Sequence
  GATA2 Guide RNA
ccggcccguggacacucaac

SEQ ID NO: 40690 - RNA, 20 nt, Artificial Sequence
  GATA2 Guide RNA
ccgggauccccgaaguugag

SEQ ID NO: 40691 - RNA, 20 nt, Artificial Sequence
  GATA2 Guide RNA
ccgggcacccuugcgccacc

SEQ ID NO: 40692 - RNA, 20 nt, Artificial Sequence
  GATA2 Guide RNA
ccggugggcucccuauaccc

SEQ ID NO: 40693 - RNA, 20 nt, Artificial Sequence
  GATA2 Guide RNA
ccguggacacucaacuucgg

SEQ ID NO: 40694 - RNA, 20 nt, Artificial Sequence
  GATA2 Guide RNA
ccuauacccgaggaggaaau

SEQ ID NO: 40695 - RNA, 20 nt, Artificial Sequence
  GATA2 Guide RNA
ccuccucggguauagggagc

SEQ ID NO: 40696 - RNA, 20 nt, Artificial Sequence
  GATA2 Guide RNA
ccucggguauagggagccca

SEQ ID NO: 40697 - RNA, 20 nt, Artificial Sequence
  GATA2 Guide RNA
ccucugcuuagcucuuuuuu

SEQ ID NO: 40698 - RNA, 20 nt, Artificial Sequence
  GATA2 Guide RNA
ccucuggccucugcuuagcu

SEQ ID NO: 40699 - RNA, 20 nt, Artificial Sequence
  GATA2 Guide RNA
ccucuuuuaucaugaaaagc

SEQ ID NO: 40700 - RNA, 20 nt, Artificial Sequence
  GATA2 Guide RNA
ccuguaauuaaccgccagcu

SEQ ID NO: 40701 - RNA, 20 nt, Artificial Sequence
  GATA2 Guide RNA
ccuguccucuggccucugcu

SEQ ID NO: 40702 - RNA, 20 nt, Artificial Sequence
  GATA2 Guide RNA
ccuucaaaugcagacgcuuu

SEQ ID NO: 40703 - RNA, 20 nt, Artificial Sequence
  GATA2 Guide RNA
ccuugcgccaccccacucug

SEQ ID NO: 40704 - RNA, 20 nt, Artificial Sequence
  GATA2 Guide RNA
cgaaagaaucuggccagaaa

SEQ ID NO: 40705 - RNA, 20 nt, Artificial Sequence
  GATA2 Guide RNA
cgaaguugaguguccacggg

SEQ ID NO: 40706 - RNA, 20 nt, Artificial Sequence
  GATA2 Guide RNA
cgaccccaacugacauccca

SEQ ID NO: 40707 - RNA, 20 nt, Artificial Sequence
  GATA2 Guide RNA
cgaggaggaaaucuggcccg

SEQ ID NO: 40708 - RNA, 20 nt, Artificial Sequence
  GATA2 Guide RNA
cgcaagggugcccggugggc

SEQ ID NO: 40709 - RNA, 20 nt, Artificial Sequence
  GATA2 Guide RNA
cgccaccccacucugcuccg

SEQ ID NO: 40710 - RNA, 20 nt, Artificial Sequence
  GATA2 Guide RNA
cgccagcuccugcccagcag

SEQ ID NO: 40711 - RNA, 20 nt, Artificial Sequence
  GATA2 Guide RNA
cgcuugaaauccucuuuuau

SEQ ID NO: 40712 - RNA, 20 nt, Artificial Sequence
  GATA2 Guide RNA
cgcuuugccgcuugaaaucc

SEQ ID NO: 40713 - RNA, 20 nt, Artificial Sequence
  GATA2 Guide RNA
cggacuccuguccucuggcc

SEQ ID NO: 40714 - RNA, 20 nt, Artificial Sequence
  GATA2 Guide RNA
cggagcagagugggguggcg

SEQ ID NO: 40715 - RNA, 20 nt, Artificial Sequence
  GATA2 Guide RNA
cggcaaagcgucugcauuug

SEQ ID NO: 40716 - RNA, 20 nt, Artificial Sequence
  GATA2 Guide RNA
cggcccguggacacucaacu

SEQ ID NO: 40717 - RNA, 20 nt, Artificial Sequence
  GATA2 Guide RNA
cgggauccccgaaguugagu

SEQ ID NO: 40718 - RNA, 20 nt, Artificial Sequence
  GATA2 Guide RNA
cgggcacccuugcgccaccc

SEQ ID NO: 40719 - RNA, 20 nt, Artificial Sequence
  GATA2 Guide RNA
cgggccagauuuccuccucg

SEQ ID NO: 40720 - RNA, 20 nt, Artificial Sequence
  GATA2 Guide RNA
cgggccggacuccuguccuc

SEQ ID NO: 40721 - RNA, 20 nt, Artificial Sequence
  GATA2 Guide RNA
cggggaucccggagcagagu

SEQ ID NO: 40722 - RNA, 20 nt, Artificial Sequence
  GATA2 Guide RNA
cggguauagggagcccaccg

SEQ ID NO: 40723 - RNA, 20 nt, Artificial Sequence
  GATA2 Guide RNA
cggugggcucccuauacccg

SEQ ID NO: 40724 - RNA, 20 nt, Artificial Sequence
  GATA2 Guide RNA
cgguuaauuacaggggaaaa

SEQ ID NO: 40725 - RNA, 20 nt, Artificial Sequence
  GATA2 Guide RNA
cgucucucuuucuggccaga

SEQ ID NO: 40726 - RNA, 20 nt, Artificial Sequence
  GATA2 Guide RNA
cgucugcauuugaaggaguu

SEQ ID NO: 40727 - RNA, 20 nt, Artificial Sequence
  GATA2 Guide RNA
cguggacacucaacuucggg

SEQ ID NO: 40728 - RNA, 20 nt, Artificial Sequence
  GATA2 Guide RNA
cuaagcagaggccagaggac

SEQ ID NO: 40729 - RNA, 20 nt, Artificial Sequence
  GATA2 Guide RNA
cuauacccgaggaggaaauc

SEQ ID NO: 40730 - RNA, 20 nt, Artificial Sequence
  GATA2 Guide RNA
cucaacuucggggaucccgg

SEQ ID NO: 40731 - RNA, 20 nt, Artificial Sequence
  GATA2 Guide RNA
cucccuauacccgaggagga

SEQ ID NO: 40732 - RNA, 20 nt, Artificial Sequence
  GATA2 Guide RNA
cuccgggauccccgaaguug

SEQ ID NO: 40733 - RNA, 20 nt, Artificial Sequence
  GATA2 Guide RNA
cuccucggguauagggagcc

SEQ ID NO: 40734 - RNA, 20 nt, Artificial Sequence
  GATA2 Guide RNA
cuccuguccucuggccucug

SEQ ID NO: 40735 - RNA, 20 nt, Artificial Sequence
  GATA2 Guide RNA
cuccuucaaaugcagacgcu

SEQ ID NO: 40736 - RNA, 20 nt, Artificial Sequence
  GATA2 Guide RNA
cucggguauagggagcccac

SEQ ID NO: 40737 - RNA, 20 nt, Artificial Sequence
  GATA2 Guide RNA
cucucuuucuggccagauuc

SEQ ID NO: 40738 - RNA, 20 nt, Artificial Sequence
  GATA2 Guide RNA
cucugcuccgggauccccga

SEQ ID NO: 40739 - RNA, 20 nt, Artificial Sequence
  GATA2 Guide RNA
cucugcuuagcucuuuuuua

SEQ ID NO: 40740 - RNA, 20 nt, Artificial Sequence
  GATA2 Guide RNA
cucuggccucugcuuagcuc

SEQ ID NO: 40741 - RNA, 20 nt, Artificial Sequence
  GATA2 Guide RNA
cucuuucuggccagauucuu

SEQ ID NO: 40742 - RNA, 20 nt, Artificial Sequence
  GATA2 Guide RNA
cucuuuuaucaugaaaagca

SEQ ID NO: 40743 - RNA, 20 nt, Artificial Sequence
  GATA2 Guide RNA
cucuuuuuuaaaaauagggc

SEQ ID NO: 40744 - RNA, 20 nt, Artificial Sequence
  GATA2 Guide RNA
cugacaucccagugcuuuuc

SEQ ID NO: 40745 - RNA, 20 nt, Artificial Sequence
  GATA2 Guide RNA
cugcauuugaaggaguuuuu

SEQ ID NO: 40746 - RNA, 20 nt, Artificial Sequence
  GATA2 Guide RNA
cugcuccgggauccccgaag

SEQ ID NO: 40747 - RNA, 20 nt, Artificial Sequence
  GATA2 Guide RNA
cugcugggcaggagcuggcg

SEQ ID NO: 40748 - RNA, 20 nt, Artificial Sequence
  GATA2 Guide RNA
cugcuuagcucuuuuuuaaa

SEQ ID NO: 40749 - RNA, 20 nt, Artificial Sequence
  GATA2 Guide RNA
cuggccagaaagagagacga

SEQ ID NO: 40750 - RNA, 20 nt, Artificial Sequence
  GATA2 Guide RNA
cuggccagauucuuucgggc

SEQ ID NO: 40751 - RNA, 20 nt, Artificial Sequence
  GATA2 Guide RNA
cuggcccgaaagaaucuggc

SEQ ID NO: 40752 - RNA, 20 nt, Artificial Sequence
  GATA2 Guide RNA
cuggccucugcuuagcucuu

SEQ ID NO: 40753 - RNA, 20 nt, Artificial Sequence
  GATA2 Guide RNA
cuggcgguuaauuacagggg

SEQ ID NO: 40754 - RNA, 20 nt, Artificial Sequence
  GATA2 Guide RNA
cugggaugucaguugggguc

SEQ ID NO: 40755 - RNA, 20 nt, Artificial Sequence
  GATA2 Guide RNA
cugggcaggagcuggcgguu

SEQ ID NO: 40756 - RNA, 20 nt, Artificial Sequence
  GATA2 Guide RNA
cuguaauuaaccgccagcuc

SEQ ID NO: 40757 - RNA, 20 nt, Artificial Sequence
  GATA2 Guide RNA
cuguccucuggccucugcuu

SEQ ID NO: 40758 - RNA, 20 nt, Artificial Sequence
  GATA2 Guide RNA
cuucaaaugcagacgcuuug

SEQ ID NO: 40759 - RNA, 20 nt, Artificial Sequence
  GATA2 Guide RNA
cuucauggcccuauuuuuaa

SEQ ID NO: 40760 - RNA, 20 nt, Artificial Sequence
  GATA2 Guide RNA
cuucggggaucccggagcag

SEQ ID NO: 40761 - RNA, 20 nt, Artificial Sequence
  GATA2 Guide RNA
cuugaaauccucuuuuauca

SEQ ID NO: 40762 - RNA, 20 nt, Artificial Sequence
  GATA2 Guide RNA
cuugcgccaccccacucugc

SEQ ID NO: 40763 - RNA, 20 nt, Artificial Sequence
  GATA2 Guide RNA
cuuucgggccagauuuccuc

SEQ ID NO: 40764 - RNA, 20 nt, Artificial Sequence
  GATA2 Guide RNA
cuuucuggccagauucuuuc

SEQ ID NO: 40765 - RNA, 20 nt, Artificial Sequence
  GATA2 Guide RNA
cuuugccgcuugaaauccuc

SEQ ID NO: 40766 - RNA, 20 nt, Artificial Sequence
  GATA2 Guide RNA
cuuuuaucaugaaaagcacu

SEQ ID NO: 40767 - RNA, 20 nt, Artificial Sequence
  GATA2 Guide RNA
cuuuucaugauaaaagagga

SEQ ID NO: 40768 - RNA, 20 nt, Artificial Sequence
  GATA2 Guide RNA
cuuuuuuaaaaauagggcca

SEQ ID NO: 40769 - RNA, 20 nt, Artificial Sequence
  GATA2 Guide RNA
gaaaagcacugggaugucag

SEQ ID NO: 40770 - RNA, 20 nt, Artificial Sequence
  GATA2 Guide RNA
gaaagaaucuggccagaaag

SEQ ID NO: 40771 - RNA, 20 nt, Artificial Sequence
  GATA2 Guide RNA
gaaagagagacgaccccaac

SEQ ID NO: 40772 - RNA, 20 nt, Artificial Sequence
  GATA2 Guide RNA
gaaauccucuuuuaucauga

SEQ ID NO: 40773 - RNA, 20 nt, Artificial Sequence
  GATA2 Guide RNA
gaaaucuggcccgaaagaau

SEQ ID NO: 40774 - RNA, 20 nt, Artificial Sequence
  GATA2 Guide RNA
gaaguugaguguccacgggc

SEQ ID NO: 40775 - RNA, 20 nt, Artificial Sequence
  GATA2 Guide RNA
gaaucuggccagaaagagag

SEQ ID NO: 40776 - RNA, 20 nt, Artificial Sequence
  GATA2 Guide RNA
gacacucaacuucggggauc

SEQ ID NO: 40777 - RNA, 20 nt, Artificial Sequence
  GATA2 Guide RNA
gacaggaguccggcccgugg

SEQ ID NO: 40778 - RNA, 20 nt, Artificial Sequence
  GATA2 Guide RNA
gacaucccagugcuuuucau

SEQ ID NO: 40779 - RNA, 20 nt, Artificial Sequence
  GATA2 Guide RNA
gaccccaacugacaucccag

SEQ ID NO: 40780 - RNA, 20 nt, Artificial Sequence
  GATA2 Guide RNA
gacgaccccaacugacaucc

SEQ ID NO: 40781 - RNA, 20 nt, Artificial Sequence
  GATA2 Guide RNA
gacgcuuugccgcuugaaau

SEQ ID NO: 40782 - RNA, 20 nt, Artificial Sequence
  GATA2 Guide RNA
gacuccuguccucuggccuc

SEQ ID NO: 40783 - RNA, 20 nt, Artificial Sequence
  GATA2 Guide RNA
gagacgaccccaacugacau

SEQ ID NO: 40784 - RNA, 20 nt, Artificial Sequence
  GATA2 Guide RNA
gagagacgaccccaacugac

SEQ ID NO: 40785 - RNA, 20 nt, Artificial Sequence
  GATA2 Guide RNA
gagcagagugggguggcgca

SEQ ID NO: 40786 - RNA, 20 nt, Artificial Sequence
  GATA2 Guide RNA
gagcccaccgggcacccuug

SEQ ID NO: 40787 - RNA, 20 nt, Artificial Sequence
  GATA2 Guide RNA
gagcuaagcagaggccagag

SEQ ID NO: 40788 - RNA, 20 nt, Artificial Sequence
  GATA2 Guide RNA
gagcuggcgguuaauuacag

SEQ ID NO: 40789 - RNA, 20 nt, Artificial Sequence
  GATA2 Guide RNA
gaggaaaucuggcccgaaag

SEQ ID NO: 40790 - RNA, 20 nt, Artificial Sequence
  GATA2 Guide RNA
gaggacaggaguccggcccg

SEQ ID NO: 40791 - RNA, 20 nt, Artificial Sequence
  GATA2 Guide RNA
gaggaggaaaucuggcccga

SEQ ID NO: 40792 - RNA, 20 nt, Artificial Sequence
  GATA2 Guide RNA
gaggauuucaagcggcaaag

SEQ ID NO: 40793 - RNA, 20 nt, Artificial Sequence
  GATA2 Guide RNA
gaggccagaggacaggaguc

SEQ ID NO: 40794 - RNA, 20 nt, Artificial Sequence
  GATA2 Guide RNA
gaguccggcccguggacacu

SEQ ID NO: 40795 - RNA, 20 nt, Artificial Sequence
  GATA2 Guide RNA
gagugggguggcgcaagggu

SEQ ID NO: 40796 - RNA, 20 nt, Artificial Sequence
  GATA2 Guide RNA
gaguguccacgggccggacu

SEQ ID NO: 40797 - RNA, 20 nt, Artificial Sequence
  GATA2 Guide RNA
gauaaaagaggauuucaagc

SEQ ID NO: 40798 - RNA, 20 nt, Artificial Sequence
  GATA2 Guide RNA
gauccccgaaguugaguguc

SEQ ID NO: 40799 - RNA, 20 nt, Artificial Sequence
  GATA2 Guide RNA
gaucccggagcagagugggg

SEQ ID NO: 40800 - RNA, 20 nt, Artificial Sequence
  GATA2 Guide RNA
gaugucaguuggggucgucu

SEQ ID NO: 40801 - RNA, 20 nt, Artificial Sequence
  GATA2 Guide RNA
gauucuuucgggccagauuu

SEQ ID NO: 40802 - RNA, 20 nt, Artificial Sequence
  GATA2 Guide RNA
gauuucaagcggcaaagcgu

SEQ ID NO: 40803 - RNA, 20 nt, Artificial Sequence
  GATA2 Guide RNA
gauuuccuccucggguauag

SEQ ID NO: 40804 - RNA, 20 nt, Artificial Sequence
  GATA2 Guide RNA
gcaaagcgucugcauuugaa

SEQ ID NO: 40805 - RNA, 20 nt, Artificial Sequence
  GATA2 Guide RNA
gcaagggugcccggugggcu

SEQ ID NO: 40806 - RNA, 20 nt, Artificial Sequence
  GATA2 Guide RNA
gcacccuugcgccaccccac

SEQ ID NO: 40807 - RNA, 20 nt, Artificial Sequence
  GATA2 Guide RNA
gcacugggaugucaguuggg

SEQ ID NO: 40808 - RNA, 20 nt, Artificial Sequence
  GATA2 Guide RNA
gcagacgcuuugccgcuuga

SEQ ID NO: 40809 - RNA, 20 nt, Artificial Sequence
  GATA2 Guide RNA
gcagaggccagaggacagga

SEQ ID NO: 40810 - RNA, 20 nt, Artificial Sequence
  GATA2 Guide RNA
gcagagugggguggcgcaag

SEQ ID NO: 40811 - RNA, 20 nt, Artificial Sequence
  GATA2 Guide RNA
gcaggagcuggcgguuaauu

SEQ ID NO: 40812 - RNA, 20 nt, Artificial Sequence
  GATA2 Guide RNA
gccaccccacucugcuccgg

SEQ ID NO: 40813 - RNA, 20 nt, Artificial Sequence
  GATA2 Guide RNA
gccagaaagagagacgaccc

SEQ ID NO: 40814 - RNA, 20 nt, Artificial Sequence
  GATA2 Guide RNA
gccagaggacaggaguccgg

SEQ ID NO: 40815 - RNA, 20 nt, Artificial Sequence
  GATA2 Guide RNA
gccagauucuuucgggccag

SEQ ID NO: 40816 - RNA, 20 nt, Artificial Sequence
  GATA2 Guide RNA
gccagauuuccuccucgggu

SEQ ID NO: 40817 - RNA, 20 nt, Artificial Sequence
  GATA2 Guide RNA
gccagcuccugcccagcagc

SEQ ID NO: 40818 - RNA, 20 nt, Artificial Sequence
  GATA2 Guide RNA
gcccaccgggcacccuugcg

SEQ ID NO: 40819 - RNA, 20 nt, Artificial Sequence
  GATA2 Guide RNA
gcccgaaagaaucuggccag

SEQ ID NO: 40820 - RNA, 20 nt, Artificial Sequence
  GATA2 Guide RNA
gcccggugggcucccuauac

SEQ ID NO: 40821 - RNA, 20 nt, Artificial Sequence
  GATA2 Guide RNA
gcccguggacacucaacuuc

SEQ ID NO: 40822 - RNA, 20 nt, Artificial Sequence
  GATA2 Guide RNA
gcccuauuuuuaaaaaagag

SEQ ID NO: 40823 - RNA, 20 nt, Artificial Sequence
  GATA2 Guide RNA
gccgcuugaaauccucuuuu

SEQ ID NO: 40824 - RNA, 20 nt, Artificial Sequence
  GATA2 Guide RNA
gccggacuccuguccucugg

SEQ ID NO: 40825 - RNA, 20 nt, Artificial Sequence
  GATA2 Guide RNA
gccucugcuuagcucuuuuu

SEQ ID NO: 40826 - RNA, 20 nt, Artificial Sequence
  GATA2 Guide RNA
gcgcaagggugcccgguggg

SEQ ID NO: 40827 - RNA, 20 nt, Artificial Sequence
  GATA2 Guide RNA
gcgccaccccacucugcucc

SEQ ID NO: 40828 - RNA, 20 nt, Artificial Sequence
  GATA2 Guide RNA
gcggcaaagcgucugcauuu

SEQ ID NO: 40829 - RNA, 20 nt, Artificial Sequence
  GATA2 Guide RNA
gcgguuaauuacaggggaaa

SEQ ID NO: 40830 - RNA, 20 nt, Artificial Sequence
  GATA2 Guide RNA
gcgucugcauuugaaggagu

SEQ ID NO: 40831 - RNA, 20 nt, Artificial Sequence
  GATA2 Guide RNA
gcuaagcagaggccagagga

SEQ ID NO: 40832 - RNA, 20 nt, Artificial Sequence
  GATA2 Guide RNA
gcucccuauacccgaggagg

SEQ ID NO: 40833 - RNA, 20 nt, Artificial Sequence
  GATA2 Guide RNA
gcuccgggauccccgaaguu

SEQ ID NO: 40834 - RNA, 20 nt, Artificial Sequence
  GATA2 Guide RNA
gcucuuuuuuaaaaauaggg

SEQ ID NO: 40835 - RNA, 20 nt, Artificial Sequence
  GATA2 Guide RNA
gcugcugggcaggagcuggc

SEQ ID NO: 40836 - RNA, 20 nt, Artificial Sequence
  GATA2 Guide RNA
gcuggcgguuaauuacaggg

SEQ ID NO: 40837 - RNA, 20 nt, Artificial Sequence
  GATA2 Guide RNA
gcugggcaggagcuggcggu

SEQ ID NO: 40838 - RNA, 20 nt, Artificial Sequence
  GATA2 Guide RNA
gcuugaaauccucuuuuauc

SEQ ID NO: 40839 - RNA, 20 nt, Artificial Sequence
  GATA2 Guide RNA
gcuuugccgcuugaaauccu

SEQ ID NO: 40840 - RNA, 20 nt, Artificial Sequence
  GATA2 Guide RNA
gcuuuucaugauaaaagagg

SEQ ID NO: 40841 - RNA, 20 nt, Artificial Sequence
  GATA2 Guide RNA
ggaaaucuggcccgaaagaa

SEQ ID NO: 40842 - RNA, 20 nt, Artificial Sequence
  GATA2 Guide RNA
ggacacucaacuucggggau

SEQ ID NO: 40843 - RNA, 20 nt, Artificial Sequence
  GATA2 Guide RNA
ggacaggaguccggcccgug

SEQ ID NO: 40844 - RNA, 20 nt, Artificial Sequence
  GATA2 Guide RNA
ggacuccuguccucuggccu

SEQ ID NO: 40845 - RNA, 20 nt, Artificial Sequence
  GATA2 Guide RNA
ggagcagagugggguggcgc

SEQ ID NO: 40846 - RNA, 20 nt, Artificial Sequence
  GATA2 Guide RNA
ggagcccaccgggcacccuu

SEQ ID NO: 40847 - RNA, 20 nt, Artificial Sequence
  GATA2 Guide RNA
ggagcuggcgguuaauuaca

SEQ ID NO: 40848 - RNA, 20 nt, Artificial Sequence
  GATA2 Guide RNA
ggaggaaaucuggcccgaaa

SEQ ID NO: 40849 - RNA, 20 nt, Artificial Sequence
  GATA2 Guide RNA
ggaguccggcccguggacac

SEQ ID NO: 40850 - RNA, 20 nt, Artificial Sequence
  GATA2 Guide RNA
ggauccccgaaguugagugu

SEQ ID NO: 40851 - RNA, 20 nt, Artificial Sequence
  GATA2 Guide RNA
ggaucccggagcagaguggg

SEQ ID NO: 40852 - RNA, 20 nt, Artificial Sequence
  GATA2 Guide RNA
ggaugucaguuggggucguc

SEQ ID NO: 40853 - RNA, 20 nt, Artificial Sequence
  GATA2 Guide RNA
ggauuucaagcggcaaagcg

SEQ ID NO: 40854 - RNA, 20 nt, Artificial Sequence
  GATA2 Guide RNA
ggcaaagcgucugcauuuga

SEQ ID NO: 40855 - RNA, 20 nt, Artificial Sequence
  GATA2 Guide RNA
ggcacccuugcgccacccca

SEQ ID NO: 40856 - RNA, 20 nt, Artificial Sequence
  GATA2 Guide RNA
ggcaggagcuggcgguuaau

SEQ ID NO: 40857 - RNA, 20 nt, Artificial Sequence
  GATA2 Guide RNA
ggccagaaagagagacgacc

SEQ ID NO: 40858 - RNA, 20 nt, Artificial Sequence
  GATA2 Guide RNA
ggccagaggacaggaguccg

SEQ ID NO: 40859 - RNA, 20 nt, Artificial Sequence
  GATA2 Guide RNA
ggccagauucuuucgggcca

SEQ ID NO: 40860 - RNA, 20 nt, Artificial Sequence
  GATA2 Guide RNA
ggccagauuuccuccucggg

SEQ ID NO: 40861 - RNA, 20 nt, Artificial Sequence
  GATA2 Guide RNA
ggcccgaaagaaucuggcca

SEQ ID NO: 40862 - RNA, 20 nt, Artificial Sequence
  GATA2 Guide RNA
ggcccguggacacucaacuu

SEQ ID NO: 40863 - RNA, 20 nt, Artificial Sequence
  GATA2 Guide RNA
ggcccuauuuuuaaaaaaga

SEQ ID NO: 40864 - RNA, 20 nt, Artificial Sequence
  GATA2 Guide RNA
ggccggacuccuguccucug

SEQ ID NO: 40865 - RNA, 20 nt, Artificial Sequence
  GATA2 Guide RNA
ggccucugcuuagcucuuuu

SEQ ID NO: 40866 - RNA, 20 nt, Artificial Sequence
  GATA2 Guide RNA
ggcgcaagggugcccggugg

SEQ ID NO: 40867 - RNA, 20 nt, Artificial Sequence
  GATA2 Guide RNA
ggcgguuaauuacaggggaa

SEQ ID NO: 40868 - RNA, 20 nt, Artificial Sequence
  GATA2 Guide RNA
ggcucccuauacccgaggag

SEQ ID NO: 40869 - RNA, 20 nt, Artificial Sequence
  GATA2 Guide RNA
ggcugcugggcaggagcugg

SEQ ID NO: 40870 - RNA, 20 nt, Artificial Sequence
  GATA2 Guide RNA
gggagcccaccgggcacccu

SEQ ID NO: 40871 - RNA, 20 nt, Artificial Sequence
  GATA2 Guide RNA
gggauccccgaaguugagug

SEQ ID NO: 40872 - RNA, 20 nt, Artificial Sequence
  GATA2 Guide RNA
gggaucccggagcagagugg

SEQ ID NO: 40873 - RNA, 20 nt, Artificial Sequence
  GATA2 Guide RNA
gggaugucaguuggggucgu

SEQ ID NO: 40874 - RNA, 20 nt, Artificial Sequence
  GATA2 Guide RNA
gggcacccuugcgccacccc

SEQ ID NO: 40875 - RNA, 20 nt, Artificial Sequence
  GATA2 Guide RNA
gggcaggagcuggcgguuaa

SEQ ID NO: 40876 - RNA, 20 nt, Artificial Sequence
  GATA2 Guide RNA
gggccagauuuccuccucgg

SEQ ID NO: 40877 - RNA, 20 nt, Artificial Sequence
  GATA2 Guide RNA
gggccggacuccuguccucu

SEQ ID NO: 40878 - RNA, 20 nt, Artificial Sequence
  GATA2 Guide RNA
gggcucccuauacccgagga

SEQ ID NO: 40879 - RNA, 20 nt, Artificial Sequence
  GATA2 Guide RNA
gggcugcugggcaggagcug

SEQ ID NO: 40880 - RNA, 20 nt, Artificial Sequence
  GATA2 Guide RNA
ggggaucccggagcagagug

SEQ ID NO: 40881 - RNA, 20 nt, Artificial Sequence
  GATA2 Guide RNA
ggggcugcugggcaggagcu

SEQ ID NO: 40882 - RNA, 20 nt, Artificial Sequence
  GATA2 Guide RNA
gggggcugcugggcaggagc

SEQ ID NO: 40883 - RNA, 20 nt, Artificial Sequence
  GATA2 Guide RNA
ggggucgucucucuuucugg

SEQ ID NO: 40884 - RNA, 20 nt, Artificial Sequence
  GATA2 Guide RNA
gggguggcgcaagggugccc

SEQ ID NO: 40885 - RNA, 20 nt, Artificial Sequence
  GATA2 Guide RNA
ggguauagggagcccaccgg

SEQ ID NO: 40886 - RNA, 20 nt, Artificial Sequence
  GATA2 Guide RNA
gggucgucucucuuucuggc

SEQ ID NO: 40887 - RNA, 20 nt, Artificial Sequence
  GATA2 Guide RNA
gggugcccggugggcucccu

SEQ ID NO: 40888 - RNA, 20 nt, Artificial Sequence
  GATA2 Guide RNA
ggguggcgcaagggugcccg

SEQ ID NO: 40889 - RNA, 20 nt, Artificial Sequence
  GATA2 Guide RNA
gguauagggagcccaccggg

SEQ ID NO: 40890 - RNA, 20 nt, Artificial Sequence
  GATA2 Guide RNA
ggucgucucucuuucuggcc

SEQ ID NO: 40891 - RNA, 20 nt, Artificial Sequence
  GATA2 Guide RNA
ggugcccggugggcucccua

SEQ ID NO: 40892 - RNA, 20 nt, Artificial Sequence
  GATA2 Guide RNA
gguggcgcaagggugcccgg

SEQ ID NO: 40893 - RNA, 20 nt, Artificial Sequence
  GATA2 Guide RNA
ggugggcucccuauacccga

SEQ ID NO: 40894 - RNA, 20 nt, Artificial Sequence
  GATA2 Guide RNA
gguuaauuacaggggaaaaa

SEQ ID NO: 40895 - RNA, 20 nt, Artificial Sequence
  GATA2 Guide RNA
guaauuaaccgccagcuccu

SEQ ID NO: 40896 - RNA, 20 nt, Artificial Sequence
  GATA2 Guide RNA
guacuucauggcccuauuuu

SEQ ID NO: 40897 - RNA, 20 nt, Artificial Sequence
  GATA2 Guide RNA
guauagggagcccaccgggc

SEQ ID NO: 40898 - RNA, 20 nt, Artificial Sequence
  GATA2 Guide RNA
gucaguuggggucgucucuc

SEQ ID NO: 40899 - RNA, 20 nt, Artificial Sequence
  GATA2 Guide RNA
guccacgggccggacuccug

SEQ ID NO: 40900 - RNA, 20 nt, Artificial Sequence
  GATA2 Guide RNA
guccggcccguggacacuca

SEQ ID NO: 40901 - RNA, 20 nt, Artificial Sequence
  GATA2 Guide RNA
guccucuggccucugcuuag

SEQ ID NO: 40902 - RNA, 20 nt, Artificial Sequence
  GATA2 Guide RNA
gucgucucucuuucuggcca

SEQ ID NO: 40903 - RNA, 20 nt, Artificial Sequence
  GATA2 Guide RNA
gucucucuuucuggccagau

SEQ ID NO: 40904 - RNA, 20 nt, Artificial Sequence
  GATA2 Guide RNA
gucugcauuugaaggaguuu

SEQ ID NO: 40905 - RNA, 20 nt, Artificial Sequence
  GATA2 Guide RNA
gugcccggugggcucccuau

SEQ ID NO: 40906 - RNA, 20 nt, Artificial Sequence
  GATA2 Guide RNA
gugcuuuucaugauaaaaga

SEQ ID NO: 40907 - RNA, 20 nt, Artificial Sequence
  GATA2 Guide RNA
guggacacucaacuucgggg

SEQ ID NO: 40908 - RNA, 20 nt, Artificial Sequence
  GATA2 Guide RNA
guggcgcaagggugcccggu

SEQ ID NO: 40909 - RNA, 20 nt, Artificial Sequence
  GATA2 Guide RNA
gugggcucccuauacccgag

SEQ ID NO: 40910 - RNA, 20 nt, Artificial Sequence
  GATA2 Guide RNA
gugggguggcgcaagggugc

SEQ ID NO: 40911 - RNA, 20 nt, Artificial Sequence
  GATA2 Guide RNA
guguccacgggccggacucc

SEQ ID NO: 40912 - RNA, 20 nt, Artificial Sequence
  GATA2 Guide RNA
guuaauuacaggggaaaaaa

SEQ ID NO: 40913 - RNA, 20 nt, Artificial Sequence
  GATA2 Guide RNA
guugaguguccacgggccgg

SEQ ID NO: 40914 - RNA, 20 nt, Artificial Sequence
  GATA2 Guide RNA
guuggggucgucucucuuuc

SEQ ID NO: 40915 - RNA, 20 nt, Artificial Sequence
  GATA2 Guide RNA
uaaaaaagagcuaagcagag

SEQ ID NO: 40916 - RNA, 20 nt, Artificial Sequence
  GATA2 Guide RNA
uaaaaauagggccaugaagu

SEQ ID NO: 40917 - RNA, 20 nt, Artificial Sequence
  GATA2 Guide RNA
uaaaagaggauuucaagcgg

SEQ ID NO: 40918 - RNA, 20 nt, Artificial Sequence
  GATA2 Guide RNA
uaaccgccagcuccugccca

SEQ ID NO: 40919 - RNA, 20 nt, Artificial Sequence
  GATA2 Guide RNA
uaagcagaggccagaggaca

SEQ ID NO: 40920 - RNA, 20 nt, Artificial Sequence
  GATA2 Guide RNA
uaauuaaccgccagcuccug

SEQ ID NO: 40921 - RNA, 20 nt, Artificial Sequence
  GATA2 Guide RNA
uacccgaggaggaaaucugg

SEQ ID NO: 40922 - RNA, 20 nt, Artificial Sequence
  GATA2 Guide RNA
uacuucauggcccuauuuuu

SEQ ID NO: 40923 - RNA, 20 nt, Artificial Sequence
  GATA2 Guide RNA
uagggagcccaccgggcacc

SEQ ID NO: 40924 - RNA, 20 nt, Artificial Sequence
  GATA2 Guide RNA
uauacccgaggaggaaaucu

SEQ ID NO: 40925 - RNA, 20 nt, Artificial Sequence
  GATA2 Guide RNA
uauagggagcccaccgggca

SEQ ID NO: 40926 - RNA, 20 nt, Artificial Sequence
  GATA2 Guide RNA
uaucaugaaaagcacuggga

SEQ ID NO: 40927 - RNA, 20 nt, Artificial Sequence
  GATA2 Guide RNA
ucaaaugcagacgcuuugcc

SEQ ID NO: 40928 - RNA, 20 nt, Artificial Sequence
  GATA2 Guide RNA
ucaacuucggggaucccgga

SEQ ID NO: 40929 - RNA, 20 nt, Artificial Sequence
  GATA2 Guide RNA
ucaagcggcaaagcgucugc

SEQ ID NO: 40930 - RNA, 20 nt, Artificial Sequence
  GATA2 Guide RNA
ucaguuggggucgucucucu

SEQ ID NO: 40931 - RNA, 20 nt, Artificial Sequence
  GATA2 Guide RNA
ucaugaaaagcacugggaug

SEQ ID NO: 40932 - RNA, 20 nt, Artificial Sequence
  GATA2 Guide RNA
ucaugauaaaagaggauuuc

SEQ ID NO: 40933 - RNA, 20 nt, Artificial Sequence
  GATA2 Guide RNA
ucauggcccuauuuuuaaaa

SEQ ID NO: 40934 - RNA, 20 nt, Artificial Sequence
  GATA2 Guide RNA
uccacgggccggacuccugu

SEQ ID NO: 40935 - RNA, 20 nt, Artificial Sequence
  GATA2 Guide RNA
ucccagugcuuuucaugaua

SEQ ID NO: 40936 - RNA, 20 nt, Artificial Sequence
  GATA2 Guide RNA
uccccgaaguugagugucca

SEQ ID NO: 40937 - RNA, 20 nt, Artificial Sequence
  GATA2 Guide RNA
uccccuguaauuaaccgcca

SEQ ID NO: 40938 - RNA, 20 nt, Artificial Sequence
  GATA2 Guide RNA
ucccggagcagaguggggug

SEQ ID NO: 40939 - RNA, 20 nt, Artificial Sequence
  GATA2 Guide RNA
ucccuauacccgaggaggaa

SEQ ID NO: 40940 - RNA, 20 nt, Artificial Sequence
  GATA2 Guide RNA
uccggcccguggacacucaa

SEQ ID NO: 40941 - RNA, 20 nt, Artificial Sequence
  GATA2 Guide RNA
uccgggauccccgaaguuga

SEQ ID NO: 40942 - RNA, 20 nt, Artificial Sequence
  GATA2 Guide RNA
uccuccucggguauagggag

SEQ ID NO: 40943 - RNA, 20 nt, Artificial Sequence
  GATA2 Guide RNA
uccucggguauagggagccc

SEQ ID NO: 40944 - RNA, 20 nt, Artificial Sequence
  GATA2 Guide RNA
uccucuggccucugcuuagc

SEQ ID NO: 40945 - RNA, 20 nt, Artificial Sequence
  GATA2 Guide RNA
uccucuuuuaucaugaaaag

SEQ ID NO: 40946 - RNA, 20 nt, Artificial Sequence
  GATA2 Guide RNA
uccuguccucuggccucugc

SEQ ID NO: 40947 - RNA, 20 nt, Artificial Sequence
  GATA2 Guide RNA
uccuucaaaugcagacgcuu

SEQ ID NO: 40948 - RNA, 20 nt, Artificial Sequence
  GATA2 Guide RNA
ucgggccagauuuccuccuc

SEQ ID NO: 40949 - RNA, 20 nt, Artificial Sequence
  GATA2 Guide RNA
ucggggaucccggagcagag

SEQ ID NO: 40950 - RNA, 20 nt, Artificial Sequence
  GATA2 Guide RNA
ucggguauagggagcccacc

SEQ ID NO: 40951 - RNA, 20 nt, Artificial Sequence
  GATA2 Guide RNA
ucgucucucuuucuggccag

SEQ ID NO: 40952 - RNA, 20 nt, Artificial Sequence
  GATA2 Guide RNA
ucucucuuucuggccagauu

SEQ ID NO: 40953 - RNA, 20 nt, Artificial Sequence
  GATA2 Guide RNA
ucucuuucuggccagauucu

SEQ ID NO: 40954 - RNA, 20 nt, Artificial Sequence
  GATA2 Guide RNA
ucugcauuugaaggaguuuu

SEQ ID NO: 40955 - RNA, 20 nt, Artificial Sequence
  GATA2 Guide RNA
ucugcuccgggauccccgaa

SEQ ID NO: 40956 - RNA, 20 nt, Artificial Sequence
  GATA2 Guide RNA
ucugcuuagcucuuuuuuaa

SEQ ID NO: 40957 - RNA, 20 nt, Artificial Sequence
  GATA2 Guide RNA
ucuggccagaaagagagacg

SEQ ID NO: 40958 - RNA, 20 nt, Artificial Sequence
  GATA2 Guide RNA
ucuggccagauucuuucggg

SEQ ID NO: 40959 - RNA, 20 nt, Artificial Sequence
  GATA2 Guide RNA
ucuggcccgaaagaaucugg

SEQ ID NO: 40960 - RNA, 20 nt, Artificial Sequence
  GATA2 Guide RNA
ucuggccucugcuuagcucu

SEQ ID NO: 40961 - RNA, 20 nt, Artificial Sequence
  GATA2 Guide RNA
ucuuucgggccagauuuccu

SEQ ID NO: 40962 - RNA, 20 nt, Artificial Sequence
  GATA2 Guide RNA
ucuuucuggccagauucuuu

SEQ ID NO: 40963 - RNA, 20 nt, Artificial Sequence
  GATA2 Guide RNA
ucuuuuaucaugaaaagcac

SEQ ID NO: 40964 - RNA, 20 nt, Artificial Sequence
  GATA2 Guide RNA
ucuuuuuuaaaaauagggcc

SEQ ID NO: 40965 - RNA, 20 nt, Artificial Sequence
  GATA2 Guide RNA
ugaaaagcacugggauguca

SEQ ID NO: 40966 - RNA, 20 nt, Artificial Sequence
  GATA2 Guide RNA
ugaaauccucuuuuaucaug

SEQ ID NO: 40967 - RNA, 20 nt, Artificial Sequence
  GATA2 Guide RNA
ugacaucccagugcuuuuca

SEQ ID NO: 40968 - RNA, 20 nt, Artificial Sequence
  GATA2 Guide RNA
ugaguguccacgggccggac

SEQ ID NO: 40969 - RNA, 20 nt, Artificial Sequence
  GATA2 Guide RNA
ugauaaaagaggauuucaag

SEQ ID NO: 40970 - RNA, 20 nt, Artificial Sequence
  GATA2 Guide RNA
ugcagacgcuuugccgcuug

SEQ ID NO: 40971 - RNA, 20 nt, Artificial Sequence
  GATA2 Guide RNA
ugcauuugaaggaguuuuuu

SEQ ID NO: 40972 - RNA, 20 nt, Artificial Sequence
  GATA2 Guide RNA
ugcccggugggcucccuaua

SEQ ID NO: 40973 - RNA, 20 nt, Artificial Sequence
  GATA2 Guide RNA
ugccgcuugaaauccucuuu

SEQ ID NO: 40974 - RNA, 20 nt, Artificial Sequence
  GATA2 Guide RNA
ugcgccaccccacucugcuc

SEQ ID NO: 40975 - RNA, 20 nt, Artificial Sequence
  GATA2 Guide RNA
ugcuccgggauccccgaagu

SEQ ID NO: 40976 - RNA, 20 nt, Artificial Sequence
  GATA2 Guide RNA
ugcugggcaggagcuggcgg

SEQ ID NO: 40977 - RNA, 20 nt, Artificial Sequence
  GATA2 Guide RNA
ugcuuuucaugauaaaagag

SEQ ID NO: 40978 - RNA, 20 nt, Artificial Sequence
  GATA2 Guide RNA
uggacacucaacuucgggga

SEQ ID NO: 40979 - RNA, 20 nt, Artificial Sequence
  GATA2 Guide RNA
uggccagaaagagagacgac

SEQ ID NO: 40980 - RNA, 20 nt, Artificial Sequence
  GATA2 Guide RNA
uggccagauucuuucgggcc

SEQ ID NO: 40981 - RNA, 20 nt, Artificial Sequence
  GATA2 Guide RNA
uggcccgaaagaaucuggcc

SEQ ID NO: 40982 - RNA, 20 nt, Artificial Sequence
  GATA2 Guide RNA
uggcccuauuuuuaaaaaag

SEQ ID NO: 40983 - RNA, 20 nt, Artificial Sequence
  GATA2 Guide RNA
uggccucugcuuagcucuuu

SEQ ID NO: 40984 - RNA, 20 nt, Artificial Sequence
  GATA2 Guide RNA
uggcgcaagggugcccggug

SEQ ID NO: 40985 - RNA, 20 nt, Artificial Sequence
  GATA2 Guide RNA
uggcgguuaauuacagggga

SEQ ID NO: 40986 - RNA, 20 nt, Artificial Sequence
  GATA2 Guide RNA
ugggaugucaguuggggucg

SEQ ID NO: 40987 - RNA, 20 nt, Artificial Sequence
  GATA2 Guide RNA
ugggcaggagcuggcgguua

SEQ ID NO: 40988 - RNA, 20 nt, Artificial Sequence
  GATA2 Guide RNA
ugggcucccuauacccgagg

SEQ ID NO: 40989 - RNA, 20 nt, Artificial Sequence
  GATA2 Guide RNA
uggggucgucucucuuucug

SEQ ID NO: 40990 - RNA, 20 nt, Artificial Sequence
  GATA2 Guide RNA
ugggguggcgcaagggugcc

SEQ ID NO: 40991 - RNA, 20 nt, Artificial Sequence
  GATA2 Guide RNA
uguaauuaaccgccagcucc

SEQ ID NO: 40992 - RNA, 20 nt, Artificial Sequence
  GATA2 Guide RNA
ugucaguuggggucgucucu

SEQ ID NO: 40993 - RNA, 20 nt, Artificial Sequence
  GATA2 Guide RNA
uguccacgggccggacuccu

SEQ ID NO: 40994 - RNA, 20 nt, Artificial Sequence
  GATA2 Guide RNA
uguccucuggccucugcuua

SEQ ID NO: 40995 - RNA, 20 nt, Artificial Sequence
  GATA2 Guide RNA
uuaaaaaagagcuaagcaga

SEQ ID NO: 40996 - RNA, 20 nt, Artificial Sequence
  GATA2 Guide RNA
uuaaaaauagggccaugaag

SEQ ID NO: 40997 - RNA, 20 nt, Artificial Sequence
  GATA2 Guide RNA
uuaaccgccagcuccugccc

SEQ ID NO: 40998 - RNA, 20 nt, Artificial Sequence
  GATA2 Guide RNA
uuaucaugaaaagcacuggg

SEQ ID NO: 40999 - RNA, 20 nt, Artificial Sequence
  GATA2 Guide RNA
uucaaaugcagacgcuuugc

SEQ ID NO: 41000 - RNA, 20 nt, Artificial Sequence
  GATA2 Guide RNA
uucaagcggcaaagcgucug

SEQ ID NO: 41001 - RNA, 20 nt, Artificial Sequence
  GATA2 Guide RNA
uucauggcccuauuuuuaaa

SEQ ID NO: 41002 - RNA, 20 nt, Artificial Sequence
  GATA2 Guide RNA
uuccccuguaauuaaccgcc

SEQ ID NO: 41003 - RNA, 20 nt, Artificial Sequence
  GATA2 Guide RNA
uuccuccucggguauaggga

SEQ ID NO: 41004 - RNA, 20 nt, Artificial Sequence
  GATA2 Guide RNA
uucgggccagauuuccuccu

SEQ ID NO: 41005 - RNA, 20 nt, Artificial Sequence
  GATA2 Guide RNA
uucggggaucccggagcaga

SEQ ID NO: 41006 - RNA, 20 nt, Artificial Sequence
  GATA2 Guide RNA
uucuggccagauucuuucgg

SEQ ID NO: 41007 - RNA, 20 nt, Artificial Sequence
  GATA2 Guide RNA
uucuuucgggccagauuucc

SEQ ID NO: 41008 - RNA, 20 nt, Artificial Sequence
  GATA2 Guide RNA
uugaguguccacgggccgga

SEQ ID NO: 41009 - RNA, 20 nt, Artificial Sequence
  GATA2 Guide RNA
uugccgcuugaaauccucuu

SEQ ID NO: 41010 - RNA, 20 nt, Artificial Sequence
  GATA2 Guide RNA
uugcgccaccccacucugcu

SEQ ID NO: 41011 - RNA, 20 nt, Artificial Sequence
  GATA2 Guide RNA
uuggggucgucucucuuucu

SEQ ID NO: 41012 - RNA, 20 nt, Artificial Sequence
  GATA2 Guide RNA
uuuaaaaaagagcuaagcag

SEQ ID NO: 41013 - RNA, 20 nt, Artificial Sequence
  GATA2 Guide RNA
uuuaaaaauagggccaugaa

SEQ ID NO: 41014 - RNA, 20 nt, Artificial Sequence
  GATA2 Guide RNA
uuuaucaugaaaagcacugg

SEQ ID NO: 41015 - RNA, 20 nt, Artificial Sequence
  GATA2 Guide RNA
uuucaagcggcaaagcgucu

SEQ ID NO: 41016 - RNA, 20 nt, Artificial Sequence
  GATA2 Guide RNA
uuuccccuguaauuaaccgc

SEQ ID NO: 41017 - RNA, 20 nt, Artificial Sequence
  GATA2 Guide RNA
uuuccuccucggguauaggg

SEQ ID NO: 41018 - RNA, 20 nt, Artificial Sequence
  GATA2 Guide RNA
uuucgggccagauuuccucc

SEQ ID NO: 41019 - RNA, 20 nt, Artificial Sequence
  GATA2 Guide RNA
uuucuggccagauucuuucg

SEQ ID NO: 41020 - RNA, 20 nt, Artificial Sequence
  GATA2 Guide RNA
uuugccgcuugaaauccucu

SEQ ID NO: 41021 - RNA, 20 nt, Artificial Sequence
  GATA2 Guide RNA
uuuuaaaaauagggccauga

SEQ ID NO: 41022 - RNA, 20 nt, Artificial Sequence
  GATA2 Guide RNA
uuuuaucaugaaaagcacug

SEQ ID NO: 41023 - RNA, 20 nt, Artificial Sequence
  GATA2 Guide RNA
uuuuccccuguaauuaaccg

SEQ ID NO: 41024 - RNA, 20 nt, Artificial Sequence
  GATA2 Guide RNA
uuuuuaaaaauagggccaug

SEQ ID NO: 41025 - RNA, 20 nt, Artificial Sequence
  GATA2 Guide RNA
uuuuuccccuguaauuaacc

SEQ ID NO: 41026 - RNA, 20 nt, Artificial Sequence
  GATA2 Guide RNA
uuuuuuccccuguaauuaac

SEQ ID NO: 41027 - RNA, 21 nt, Artificial Sequence
  GATA2 Guide RNA
aaaaaacuccuucaaaugcag

SEQ ID NO: 41028 - RNA, 21 nt, Artificial Sequence
  GATA2 Guide RNA
aaaaaagagcuaagcagaggc

SEQ ID NO: 41029 - RNA, 21 nt, Artificial Sequence
  GATA2 Guide RNA
aaaaacuccuucaaaugcaga

SEQ ID NO: 41030 - RNA, 21 nt, Artificial Sequence
  GATA2 Guide RNA
aaaaagagcuaagcagaggcc

SEQ ID NO: 41031 - RNA, 21 nt, Artificial Sequence
  GATA2 Guide RNA
aaaaauagggccaugaaguac

SEQ ID NO: 41032 - RNA, 21 nt, Artificial Sequence
  GATA2 Guide RNA
aaaacuccuucaaaugcagac

SEQ ID NO: 41033 - RNA, 21 nt, Artificial Sequence
  GATA2 Guide RNA
aaaagagcuaagcagaggcca

SEQ ID NO: 41034 - RNA, 21 nt, Artificial Sequence
  GATA2 Guide RNA
aaaagaggauuucaagcggca

SEQ ID NO: 41035 - RNA, 21 nt, Artificial Sequence
  GATA2 Guide RNA
aaaagcacugggaugucaguu

SEQ ID NO: 41036 - RNA, 21 nt, Artificial Sequence
  GATA2 Guide RNA
aaaaguacuucauggcccuau

SEQ ID NO: 41037 - RNA, 21 nt, Artificial Sequence
  GATA2 Guide RNA
aaacuccuucaaaugcagacg

SEQ ID NO: 41038 - RNA, 21 nt, Artificial Sequence
  GATA2 Guide RNA
aaagaaucuggccagaaagag

SEQ ID NO: 41039 - RNA, 21 nt, Artificial Sequence
  GATA2 Guide RNA
aaagagagacgaccccaacug

SEQ ID NO: 41040 - RNA, 21 nt, Artificial Sequence
  GATA2 Guide RNA
aaagagcuaagcagaggccag

SEQ ID NO: 41041 - RNA, 21 nt, Artificial Sequence
  GATA2 Guide RNA
aaagaggauuucaagcggcaa

SEQ ID NO: 41042 - RNA, 21 nt, Artificial Sequence
  GATA2 Guide RNA
aaagcacugggaugucaguug

SEQ ID NO: 41043 - RNA, 21 nt, Artificial Sequence
  GATA2 Guide RNA
aaagcgucugcauuugaagga

SEQ ID NO: 41044 - RNA, 21 nt, Artificial Sequence
  GATA2 Guide RNA
aaaguacuucauggcccuauu

SEQ ID NO: 41045 - RNA, 21 nt, Artificial Sequence
  GATA2 Guide RNA
aaaucuggcccgaaagaaucu

SEQ ID NO: 41046 - RNA, 21 nt, Artificial Sequence
  GATA2 Guide RNA
aaaugcagacgcuuugccgcu

SEQ ID NO: 41047 - RNA, 21 nt, Artificial Sequence
  GATA2 Guide RNA
aaccgccagcuccugcccagc

SEQ ID NO: 41048 - RNA, 21 nt, Artificial Sequence
  GATA2 Guide RNA
aacuccuucaaaugcagacgc

SEQ ID NO: 41049 - RNA, 21 nt, Artificial Sequence
  GATA2 Guide RNA
aacugacaucccagugcuuuu

SEQ ID NO: 41050 - RNA, 21 nt, Artificial Sequence
  GATA2 Guide RNA
aacuucggggaucccggagca

SEQ ID NO: 41051 - RNA, 21 nt, Artificial Sequence
  GATA2 Guide RNA
aagaaucuggccagaaagaga

SEQ ID NO: 41052 - RNA, 21 nt, Artificial Sequence
  GATA2 Guide RNA
aagagagacgaccccaacuga

SEQ ID NO: 41053 - RNA, 21 nt, Artificial Sequence
  GATA2 Guide RNA
aagagcuaagcagaggccaga

SEQ ID NO: 41054 - RNA, 21 nt, Artificial Sequence
  GATA2 Guide RNA
aagaggauuucaagcggcaaa

SEQ ID NO: 41055 - RNA, 21 nt, Artificial Sequence
  GATA2 Guide RNA
aagcacugggaugucaguugg

SEQ ID NO: 41056 - RNA, 21 nt, Artificial Sequence
  GATA2 Guide RNA
aagcagaggccagaggacagg

SEQ ID NO: 41057 - RNA, 21 nt, Artificial Sequence
  GATA2 Guide RNA
aagcggcaaagcgucugcauu

SEQ ID NO: 41058 - RNA, 21 nt, Artificial Sequence
  GATA2 Guide RNA
aagcgucugcauuugaaggag

SEQ ID NO: 41059 - RNA, 21 nt, Artificial Sequence
  GATA2 Guide RNA
aagggugcccggugggcuccc

SEQ ID NO: 41060 - RNA, 21 nt, Artificial Sequence
  GATA2 Guide RNA
aaguacuucauggcccuauuu

SEQ ID NO: 41061 - RNA, 21 nt, Artificial Sequence
  GATA2 Guide RNA
aaguugaguguccacgggccg

SEQ ID NO: 41062 - RNA, 21 nt, Artificial Sequence
  GATA2 Guide RNA
aaucuggccagaaagagagac

SEQ ID NO: 41063 - RNA, 21 nt, Artificial Sequence
  GATA2 Guide RNA
aaucuggcccgaaagaaucug

SEQ ID NO: 41064 - RNA, 21 nt, Artificial Sequence
  GATA2 Guide RNA
aaugcagacgcuuugccgcuu

SEQ ID NO: 41065 - RNA, 21 nt, Artificial Sequence
  GATA2 Guide RNA
aauuaaccgccagcuccugcc

SEQ ID NO: 41066 - RNA, 21 nt, Artificial Sequence
  GATA2 Guide RNA
acacucaacuucggggauccc

SEQ ID NO: 41067 - RNA, 21 nt, Artificial Sequence
  GATA2 Guide RNA
acaggaguccggcccguggac

SEQ ID NO: 41068 - RNA, 21 nt, Artificial Sequence
  GATA2 Guide RNA
acaucccagugcuuuucauga

SEQ ID NO: 41069 - RNA, 21 nt, Artificial Sequence
  GATA2 Guide RNA
accccaacugacaucccagug

SEQ ID NO: 41070 - RNA, 21 nt, Artificial Sequence
  GATA2 Guide RNA
accccacucugcuccgggauc

SEQ ID NO: 41071 - RNA, 21 nt, Artificial Sequence
  GATA2 Guide RNA
acccgaggaggaaaucuggcc

SEQ ID NO: 41072 - RNA, 21 nt, Artificial Sequence
  GATA2 Guide RNA
acccuugcgccaccccacucu

SEQ ID NO: 41073 - RNA, 21 nt, Artificial Sequence
  GATA2 Guide RNA
accgccagcuccugcccagca

SEQ ID NO: 41074 - RNA, 21 nt, Artificial Sequence
  GATA2 Guide RNA
accgggcacccuugcgccacc

SEQ ID NO: 41075 - RNA, 21 nt, Artificial Sequence
  GATA2 Guide RNA
acgaccccaacugacauccca

SEQ ID NO: 41076 - RNA, 21 nt, Artificial Sequence
  GATA2 Guide RNA
acgcuuugccgcuugaaaucc

SEQ ID NO: 41077 - RNA, 21 nt, Artificial Sequence
  GATA2 Guide RNA
acgggccggacuccuguccuc

SEQ ID NO: 41078 - RNA, 21 nt, Artificial Sequence
  GATA2 Guide RNA
acucaacuucggggaucccgg

SEQ ID NO: 41079 - RNA, 21 nt, Artificial Sequence
  GATA2 Guide RNA
acuccuguccucuggccucug

SEQ ID NO: 41080 - RNA, 21 nt, Artificial Sequence
  GATA2 Guide RNA
acuccuucaaaugcagacgcu

SEQ ID NO: 41081 - RNA, 21 nt, Artificial Sequence
  GATA2 Guide RNA
acucugcuccgggauccccga

SEQ ID NO: 41082 - RNA, 21 nt, Artificial Sequence
  GATA2 Guide RNA
acugacaucccagugcuuuuc

SEQ ID NO: 41083 - RNA, 21 nt, Artificial Sequence
  GATA2 Guide RNA
acugggaugucaguugggguc

SEQ ID NO: 41084 - RNA, 21 nt, Artificial Sequence
  GATA2 Guide RNA
acuucauggcccuauuuuuaa

SEQ ID NO: 41085 - RNA, 21 nt, Artificial Sequence
  GATA2 Guide RNA
acuucggggaucccggagcag

SEQ ID NO: 41086 - RNA, 21 nt, Artificial Sequence
  GATA2 Guide RNA
agaaagagagacgaccccaac

SEQ ID NO: 41087 - RNA, 21 nt, Artificial Sequence
  GATA2 Guide RNA
agaaucuggccagaaagagag

SEQ ID NO: 41088 - RNA, 21 nt, Artificial Sequence
  GATA2 Guide RNA
agacgaccccaacugacaucc

SEQ ID NO: 41089 - RNA, 21 nt, Artificial Sequence
  GATA2 Guide RNA
agacgcuuugccgcuugaaau

SEQ ID NO: 41090 - RNA, 21 nt, Artificial Sequence
  GATA2 Guide RNA
agagacgaccccaacugacau

SEQ ID NO: 41091 - RNA, 21 nt, Artificial Sequence
  GATA2 Guide RNA
agagagacgaccccaacugac

SEQ ID NO: 41092 - RNA, 21 nt, Artificial Sequence
  GATA2 Guide RNA
agagcuaagcagaggccagag

SEQ ID NO: 41093 - RNA, 21 nt, Artificial Sequence
  GATA2 Guide RNA
agaggacaggaguccggcccg

SEQ ID NO: 41094 - RNA, 21 nt, Artificial Sequence
  GATA2 Guide RNA
agaggauuucaagcggcaaag

SEQ ID NO: 41095 - RNA, 21 nt, Artificial Sequence
  GATA2 Guide RNA
agaggccagaggacaggaguc

SEQ ID NO: 41096 - RNA, 21 nt, Artificial Sequence
  GATA2 Guide RNA
agagugggguggcgcaagggu

SEQ ID NO: 41097 - RNA, 21 nt, Artificial Sequence
  GATA2 Guide RNA
agauucuuucgggccagauuu

SEQ ID NO: 41098 - RNA, 21 nt, Artificial Sequence
  GATA2 Guide RNA
agauuuccuccucggguauag

SEQ ID NO: 41099 - RNA, 21 nt, Artificial Sequence
  GATA2 Guide RNA
agcacugggaugucaguuggg

SEQ ID NO: 41100 - RNA, 21 nt, Artificial Sequence
  GATA2 Guide RNA
agcagaggccagaggacagga

SEQ ID NO: 41101 - RNA, 21 nt, Artificial Sequence
  GATA2 Guide RNA
agcagagugggguggcgcaag

SEQ ID NO: 41102 - RNA, 21 nt, Artificial Sequence
  GATA2 Guide RNA
agcccaccgggcacccuugcg

SEQ ID NO: 41103 - RNA, 21 nt, Artificial Sequence
  GATA2 Guide RNA
agcggcaaagcgucugcauuu

SEQ ID NO: 41104 - RNA, 21 nt, Artificial Sequence
  GATA2 Guide RNA
agcgucugcauuugaaggagu

SEQ ID NO: 41105 - RNA, 21 nt, Artificial Sequence
  GATA2 Guide RNA
agcuaagcagaggccagagga

SEQ ID NO: 41106 - RNA, 21 nt, Artificial Sequence
  GATA2 Guide RNA
agcuggcgguuaauuacaggg

SEQ ID NO: 41107 - RNA, 21 nt, Artificial Sequence
  GATA2 Guide RNA
aggaaaucuggcccgaaagaa

SEQ ID NO: 41108 - RNA, 21 nt, Artificial Sequence
  GATA2 Guide RNA
aggacaggaguccggcccgug

SEQ ID NO: 41109 - RNA, 21 nt, Artificial Sequence
  GATA2 Guide RNA
aggagcuggcgguuaauuaca

SEQ ID NO: 41110 - RNA, 21 nt, Artificial Sequence
  GATA2 Guide RNA
aggaggaaaucuggcccgaaa

SEQ ID NO: 41111 - RNA, 21 nt, Artificial Sequence
  GATA2 Guide RNA
aggaguccggcccguggacac

SEQ ID NO: 41112 - RNA, 21 nt, Artificial Sequence
  GATA2 Guide RNA
aggauuucaagcggcaaagcg

SEQ ID NO: 41113 - RNA, 21 nt, Artificial Sequence
  GATA2 Guide RNA
aggccagaggacaggaguccg

SEQ ID NO: 41114 - RNA, 21 nt, Artificial Sequence
  GATA2 Guide RNA
agggagcccaccgggcacccu

SEQ ID NO: 41115 - RNA, 21 nt, Artificial Sequence
  GATA2 Guide RNA
agggugcccggugggcucccu

SEQ ID NO: 41116 - RNA, 21 nt, Artificial Sequence
  GATA2 Guide RNA
aguacuucauggcccuauuuu

SEQ ID NO: 41117 - RNA, 21 nt, Artificial Sequence
  GATA2 Guide RNA
aguccggcccguggacacuca

SEQ ID NO: 41118 - RNA, 21 nt, Artificial Sequence
  GATA2 Guide RNA
agugggguggcgcaagggugc

SEQ ID NO: 41119 - RNA, 21 nt, Artificial Sequence
  GATA2 Guide RNA
aguguccacgggccggacucc

SEQ ID NO: 41120 - RNA, 21 nt, Artificial Sequence
  GATA2 Guide RNA
aguugaguguccacgggccgg

SEQ ID NO: 41121 - RNA, 21 nt, Artificial Sequence
  GATA2 Guide RNA
aguuggggucgucucucuuuc

SEQ ID NO: 41122 - RNA, 21 nt, Artificial Sequence
  GATA2 Guide RNA
auaaaagaggauuucaagcgg

SEQ ID NO: 41123 - RNA, 21 nt, Artificial Sequence
  GATA2 Guide RNA
auacccgaggaggaaaucugg

SEQ ID NO: 41124 - RNA, 21 nt, Artificial Sequence
  GATA2 Guide RNA
auagggagcccaccgggcacc

SEQ ID NO: 41125 - RNA, 21 nt, Artificial Sequence
  GATA2 Guide RNA
aucaugaaaagcacugggaug

SEQ ID NO: 41126 - RNA, 21 nt, Artificial Sequence
  GATA2 Guide RNA
aucccagugcuuuucaugaua

SEQ ID NO: 41127 - RNA, 21 nt, Artificial Sequence
  GATA2 Guide RNA
auccccgaaguugagugucca

SEQ ID NO: 41128 - RNA, 21 nt, Artificial Sequence
  GATA2 Guide RNA
aucccggagcagaguggggug

SEQ ID NO: 41129 - RNA, 21 nt, Artificial Sequence
  GATA2 Guide RNA
aucuggccagaaagagagacg

SEQ ID NO: 41130 - RNA, 21 nt, Artificial Sequence
  GATA2 Guide RNA
aucuggcccgaaagaaucugg

SEQ ID NO: 41131 - RNA, 21 nt, Artificial Sequence
  GATA2 Guide RNA
augaaaagcacugggauguca

SEQ ID NO: 41132 - RNA, 21 nt, Artificial Sequence
  GATA2 Guide RNA
augcagacgcuuugccgcuug

SEQ ID NO: 41133 - RNA, 21 nt, Artificial Sequence
  GATA2 Guide RNA
augucaguuggggucgucucu

SEQ ID NO: 41134 - RNA, 21 nt, Artificial Sequence
  GATA2 Guide RNA
auuaaccgccagcuccugccc

SEQ ID NO: 41135 - RNA, 21 nt, Artificial Sequence
  GATA2 Guide RNA
auucuuucgggccagauuucc

SEQ ID NO: 41136 - RNA, 21 nt, Artificial Sequence
  GATA2 Guide RNA
auuucaagcggcaaagcgucu

SEQ ID NO: 41137 - RNA, 21 nt, Artificial Sequence
  GATA2 Guide RNA
auuuccuccucggguauaggg

SEQ ID NO: 41138 - RNA, 21 nt, Artificial Sequence
  GATA2 Guide RNA
caaagcgucugcauuugaagg

SEQ ID NO: 41139 - RNA, 21 nt, Artificial Sequence
  GATA2 Guide RNA
caaaugcagacgcuuugccgc

SEQ ID NO: 41140 - RNA, 21 nt, Artificial Sequence
  GATA2 Guide RNA
caacugacaucccagugcuuu

SEQ ID NO: 41141 - RNA, 21 nt, Artificial Sequence
  GATA2 Guide RNA
caacuucggggaucccggagc

SEQ ID NO: 41142 - RNA, 21 nt, Artificial Sequence
  GATA2 Guide RNA
caagcggcaaagcgucugcau

SEQ ID NO: 41143 - RNA, 21 nt, Artificial Sequence
  GATA2 Guide RNA
caagggugcccggugggcucc

SEQ ID NO: 41144 - RNA, 21 nt, Artificial Sequence
  GATA2 Guide RNA
caccccacucugcuccgggau

SEQ ID NO: 41145 - RNA, 21 nt, Artificial Sequence
  GATA2 Guide RNA
cacccuugcgccaccccacuc

SEQ ID NO: 41146 - RNA, 21 nt, Artificial Sequence
  GATA2 Guide RNA
caccgggcacccuugcgccac

SEQ ID NO: 41147 - RNA, 21 nt, Artificial Sequence
  GATA2 Guide RNA
cacgggccggacuccuguccu

SEQ ID NO: 41148 - RNA, 21 nt, Artificial Sequence
  GATA2 Guide RNA
cacucaacuucggggaucccg

SEQ ID NO: 41149 - RNA, 21 nt, Artificial Sequence
  GATA2 Guide RNA
cacucugcuccgggauccccg

SEQ ID NO: 41150 - RNA, 21 nt, Artificial Sequence
  GATA2 Guide RNA
cacugggaugucaguuggggu

SEQ ID NO: 41151 - RNA, 21 nt, Artificial Sequence
  GATA2 Guide RNA
cagaaagagagacgaccccaa

SEQ ID NO: 41152 - RNA, 21 nt, Artificial Sequence
  GATA2 Guide RNA
cagacgcuuugccgcuugaaa

SEQ ID NO: 41153 - RNA, 21 nt, Artificial Sequence
  GATA2 Guide RNA
cagaggacaggaguccggccc

SEQ ID NO: 41154 - RNA, 21 nt, Artificial Sequence
  GATA2 Guide RNA
cagaggccagaggacaggagu

SEQ ID NO: 41155 - RNA, 21 nt, Artificial Sequence
  GATA2 Guide RNA
cagagugggguggcgcaaggg

SEQ ID NO: 41156 - RNA, 21 nt, Artificial Sequence
  GATA2 Guide RNA
cagauucuuucgggccagauu

SEQ ID NO: 41157 - RNA, 21 nt, Artificial Sequence
  GATA2 Guide RNA
cagauuuccuccucggguaua

SEQ ID NO: 41158 - RNA, 21 nt, Artificial Sequence
  GATA2 Guide RNA
caggagcuggcgguuaauuac

SEQ ID NO: 41159 - RNA, 21 nt, Artificial Sequence
  GATA2 Guide RNA
caggaguccggcccguggaca

SEQ ID NO: 41160 - RNA, 21 nt, Artificial Sequence
  GATA2 Guide RNA
cagugcuuuucaugauaaaag

SEQ ID NO: 41161 - RNA, 21 nt, Artificial Sequence
  GATA2 Guide RNA
caguuggggucgucucucuuu

SEQ ID NO: 41162 - RNA, 21 nt, Artificial Sequence
  GATA2 Guide RNA
caucccagugcuuuucaugau

SEQ ID NO: 41163 - RNA, 21 nt, Artificial Sequence
  GATA2 Guide RNA
caugaaaagcacugggauguc

SEQ ID NO: 41164 - RNA, 21 nt, Artificial Sequence
  GATA2 Guide RNA
ccaacugacaucccagugcuu

SEQ ID NO: 41165 - RNA, 21 nt, Artificial Sequence
  GATA2 Guide RNA
ccaccccacucugcuccggga

SEQ ID NO: 41166 - RNA, 21 nt, Artificial Sequence
  GATA2 Guide RNA
ccaccgggcacccuugcgcca

SEQ ID NO: 41167 - RNA, 21 nt, Artificial Sequence
  GATA2 Guide RNA
ccacgggccggacuccugucc

SEQ ID NO: 41168 - RNA, 21 nt, Artificial Sequence
  GATA2 Guide RNA
ccacucugcuccgggaucccc

SEQ ID NO: 41169 - RNA, 21 nt, Artificial Sequence
  GATA2 Guide RNA
ccagaaagagagacgacccca

SEQ ID NO: 41170 - RNA, 21 nt, Artificial Sequence
  GATA2 Guide RNA
ccagaggacaggaguccggcc

SEQ ID NO: 41171 - RNA, 21 nt, Artificial Sequence
  GATA2 Guide RNA
ccagauucuuucgggccagau

SEQ ID NO: 41172 - RNA, 21 nt, Artificial Sequence
  GATA2 Guide RNA
ccagauuuccuccucggguau

SEQ ID NO: 41173 - RNA, 21 nt, Artificial Sequence
  GATA2 Guide RNA
ccagugcuuuucaugauaaaa

SEQ ID NO: 41174 - RNA, 21 nt, Artificial Sequence
  GATA2 Guide RNA
cccaacugacaucccagugcu

SEQ ID NO: 41175 - RNA, 21 nt, Artificial Sequence
  GATA2 Guide RNA
cccacucugcuccgggauccc

SEQ ID NO: 41176 - RNA, 21 nt, Artificial Sequence
  GATA2 Guide RNA
cccagugcuuuucaugauaaa

SEQ ID NO: 41177 - RNA, 21 nt, Artificial Sequence
  GATA2 Guide RNA
ccccaacugacaucccagugc

SEQ ID NO: 41178 - RNA, 21 nt, Artificial Sequence
  GATA2 Guide RNA
ccccacucugcuccgggaucc

SEQ ID NO: 41179 - RNA, 21 nt, Artificial Sequence
  GATA2 Guide RNA
ccccgaaguugaguguccacg

SEQ ID NO: 41180 - RNA, 21 nt, Artificial Sequence
  GATA2 Guide RNA
ccccuguaauuaaccgccagc

SEQ ID NO: 41181 - RNA, 21 nt, Artificial Sequence
  GATA2 Guide RNA
cccgaaagaaucuggccagaa

SEQ ID NO: 41182 - RNA, 21 nt, Artificial Sequence
  GATA2 Guide RNA
cccgaaguugaguguccacgg

SEQ ID NO: 41183 - RNA, 21 nt, Artificial Sequence
  GATA2 Guide RNA
cccgaggaggaaaucuggccc

SEQ ID NO: 41184 - RNA, 21 nt, Artificial Sequence
  GATA2 Guide RNA
cccggagcagagugggguggc

SEQ ID NO: 41185 - RNA, 21 nt, Artificial Sequence
  GATA2 Guide RNA
cccggugggcucccuauaccc

SEQ ID NO: 41186 - RNA, 21 nt, Artificial Sequence
  GATA2 Guide RNA
cccguggacacucaacuucgg

SEQ ID NO: 41187 - RNA, 21 nt, Artificial Sequence
  GATA2 Guide RNA
cccuauacccgaggaggaaau

SEQ ID NO: 41188 - RNA, 21 nt, Artificial Sequence
  GATA2 Guide RNA
cccuguaauuaaccgccagcu

SEQ ID NO: 41189 - RNA, 21 nt, Artificial Sequence
  GATA2 Guide RNA
cccuugcgccaccccacucug

SEQ ID NO: 41190 - RNA, 21 nt, Artificial Sequence
  GATA2 Guide RNA
ccgaaagaaucuggccagaaa

SEQ ID NO: 41191 - RNA, 21 nt, Artificial Sequence
  GATA2 Guide RNA
ccgaaguugaguguccacggg

SEQ ID NO: 41192 - RNA, 21 nt, Artificial Sequence
  GATA2 Guide RNA
ccgaggaggaaaucuggcccg

SEQ ID NO: 41193 - RNA, 21 nt, Artificial Sequence
  GATA2 Guide RNA
ccgccagcuccugcccagcag

SEQ ID NO: 41194 - RNA, 21 nt, Artificial Sequence
  GATA2 Guide RNA
ccgcuugaaauccucuuuuau

SEQ ID NO: 41195 - RNA, 21 nt, Artificial Sequence
  GATA2 Guide RNA
ccggacuccuguccucuggcc

SEQ ID NO: 41196 - RNA, 21 nt, Artificial Sequence
  GATA2 Guide RNA
ccggagcagagugggguggcg

SEQ ID NO: 41197 - RNA, 21 nt, Artificial Sequence
  GATA2 Guide RNA
ccggcccguggacacucaacu

SEQ ID NO: 41198 - RNA, 21 nt, Artificial Sequence
  GATA2 Guide RNA
ccgggauccccgaaguugagu

SEQ ID NO: 41199 - RNA, 21 nt, Artificial Sequence
  GATA2 Guide RNA
ccggugggcucccuauacccg

SEQ ID NO: 41200 - RNA, 21 nt, Artificial Sequence
  GATA2 Guide RNA
ccguggacacucaacuucggg

SEQ ID NO: 41201 - RNA, 21 nt, Artificial Sequence
  GATA2 Guide RNA
ccuauacccgaggaggaaauc

SEQ ID NO: 41202 - RNA, 21 nt, Artificial Sequence
  GATA2 Guide RNA
ccuccucggguauagggagcc

SEQ ID NO: 41203 - RNA, 21 nt, Artificial Sequence
  GATA2 Guide RNA
ccucggguauagggagcccac

SEQ ID NO: 41204 - RNA, 21 nt, Artificial Sequence
  GATA2 Guide RNA
ccucugcuuagcucuuuuuua

SEQ ID NO: 41205 - RNA, 21 nt, Artificial Sequence
  GATA2 Guide RNA
ccucuggccucugcuuagcuc

SEQ ID NO: 41206 - RNA, 21 nt, Artificial Sequence
  GATA2 Guide RNA
ccucuuuuaucaugaaaagca

SEQ ID NO: 41207 - RNA, 21 nt, Artificial Sequence
  GATA2 Guide RNA
ccuguaauuaaccgccagcuc

SEQ ID NO: 41208 - RNA, 21 nt, Artificial Sequence
  GATA2 Guide RNA
ccuguccucuggccucugcuu

SEQ ID NO: 41209 - RNA, 21 nt, Artificial Sequence
  GATA2 Guide RNA
ccuucaaaugcagacgcuuug

SEQ ID NO: 41210 - RNA, 21 nt, Artificial Sequence
  GATA2 Guide RNA
ccuugcgccaccccacucugc

SEQ ID NO: 41211 - RNA, 21 nt, Artificial Sequence
  GATA2 Guide RNA
cgaaagaaucuggccagaaag

SEQ ID NO: 41212 - RNA, 21 nt, Artificial Sequence
  GATA2 Guide RNA
cgaaguugaguguccacgggc

SEQ ID NO: 41213 - RNA, 21 nt, Artificial Sequence
  GATA2 Guide RNA
cgaccccaacugacaucccag

SEQ ID NO: 41214 - RNA, 21 nt, Artificial Sequence
  GATA2 Guide RNA
cgaggaggaaaucuggcccga

SEQ ID NO: 41215 - RNA, 21 nt, Artificial Sequence
  GATA2 Guide RNA
cgcaagggugcccggugggcu

SEQ ID NO: 41216 - RNA, 21 nt, Artificial Sequence
  GATA2 Guide RNA
cgccaccccacucugcuccgg

SEQ ID NO: 41217 - RNA, 21 nt, Artificial Sequence
  GATA2 Guide RNA
cgccagcuccugcccagcagc

SEQ ID NO: 41218 - RNA, 21 nt, Artificial Sequence
  GATA2 Guide RNA
cgcuugaaauccucuuuuauc

SEQ ID NO: 41219 - RNA, 21 nt, Artificial Sequence
  GATA2 Guide RNA
cgcuuugccgcuugaaauccu

SEQ ID NO: 41220 - RNA, 21 nt, Artificial Sequence
  GATA2 Guide RNA
cggacuccuguccucuggccu

SEQ ID NO: 41221 - RNA, 21 nt, Artificial Sequence
  GATA2 Guide RNA
cggagcagagugggguggcgc

SEQ ID NO: 41222 - RNA, 21 nt, Artificial Sequence
  GATA2 Guide RNA
cggcaaagcgucugcauuuga

SEQ ID NO: 41223 - RNA, 21 nt, Artificial Sequence
  GATA2 Guide RNA
cggcccguggacacucaacuu

SEQ ID NO: 41224 - RNA, 21 nt, Artificial Sequence
  GATA2 Guide RNA
cgggauccccgaaguugagug

SEQ ID NO: 41225 - RNA, 21 nt, Artificial Sequence
  GATA2 Guide RNA
cgggccagauuuccuccucgg

SEQ ID NO: 41226 - RNA, 21 nt, Artificial Sequence
  GATA2 Guide RNA
cgggccggacuccuguccucu

SEQ ID NO: 41227 - RNA, 21 nt, Artificial Sequence
  GATA2 Guide RNA
cggggaucccggagcagagug

SEQ ID NO: 41228 - RNA, 21 nt, Artificial Sequence
  GATA2 Guide RNA
cggguauagggagcccaccgg

SEQ ID NO: 41229 - RNA, 21 nt, Artificial Sequence
  GATA2 Guide RNA
cggugggcucccuauacccga

SEQ ID NO: 41230 - RNA, 21 nt, Artificial Sequence
  GATA2 Guide RNA
cgguuaauuacaggggaaaaa

SEQ ID NO: 41231 - RNA, 21 nt, Artificial Sequence
  GATA2 Guide RNA
cgucucucuuucuggccagau

SEQ ID NO: 41232 - RNA, 21 nt, Artificial Sequence
  GATA2 Guide RNA
cgucugcauuugaaggaguuu

SEQ ID NO: 41233 - RNA, 21 nt, Artificial Sequence
  GATA2 Guide RNA
cguggacacucaacuucgggg

SEQ ID NO: 41234 - RNA, 21 nt, Artificial Sequence
  GATA2 Guide RNA
cuaagcagaggccagaggaca

SEQ ID NO: 41235 - RNA, 21 nt, Artificial Sequence
  GATA2 Guide RNA
cuauacccgaggaggaaaucu

SEQ ID NO: 41236 - RNA, 21 nt, Artificial Sequence
  GATA2 Guide RNA
cucaacuucggggaucccgga

SEQ ID NO: 41237 - RNA, 21 nt, Artificial Sequence
  GATA2 Guide RNA
cucccuauacccgaggaggaa

SEQ ID NO: 41238 - RNA, 21 nt, Artificial Sequence
  GATA2 Guide RNA
cuccgggauccccgaaguuga

SEQ ID NO: 41239 - RNA, 21 nt, Artificial Sequence
  GATA2 Guide RNA
cuccucggguauagggagccc

SEQ ID NO: 41240 - RNA, 21 nt, Artificial Sequence
  GATA2 Guide RNA
cuccuguccucuggccucugc

SEQ ID NO: 41241 - RNA, 21 nt, Artificial Sequence
  GATA2 Guide RNA
cuccuucaaaugcagacgcuu

SEQ ID NO: 41242 - RNA, 21 nt, Artificial Sequence
  GATA2 Guide RNA
cucggguauagggagcccacc

SEQ ID NO: 41243 - RNA, 21 nt, Artificial Sequence
  GATA2 Guide RNA
cucucuuucuggccagauucu

SEQ ID NO: 41244 - RNA, 21 nt, Artificial Sequence
  GATA2 Guide RNA
cucugcuccgggauccccgaa

SEQ ID NO: 41245 - RNA, 21 nt, Artificial Sequence
  GATA2 Guide RNA
cucugcuuagcucuuuuuuaa

SEQ ID NO: 41246 - RNA, 21 nt, Artificial Sequence
  GATA2 Guide RNA
cucuggccucugcuuagcucu

SEQ ID NO: 41247 - RNA, 21 nt, Artificial Sequence
  GATA2 Guide RNA
cucuuucuggccagauucuuu

SEQ ID NO: 41248 - RNA, 21 nt, Artificial Sequence
  GATA2 Guide RNA
cucuuuuaucaugaaaagcac

SEQ ID NO: 41249 - RNA, 21 nt, Artificial Sequence
  GATA2 Guide RNA
cucuuuuuuaaaaauagggcc

SEQ ID NO: 41250 - RNA, 21 nt, Artificial Sequence
  GATA2 Guide RNA
cugacaucccagugcuuuuca

SEQ ID NO: 41251 - RNA, 21 nt, Artificial Sequence
  GATA2 Guide RNA
cugcauuugaaggaguuuuuu

SEQ ID NO: 41252 - RNA, 21 nt, Artificial Sequence
  GATA2 Guide RNA
cugcuccgggauccccgaagu

SEQ ID NO: 41253 - RNA, 21 nt, Artificial Sequence
  GATA2 Guide RNA
cugcugggcaggagcuggcgg

SEQ ID NO: 41254 - RNA, 21 nt, Artificial Sequence
  GATA2 Guide RNA
cuggccagaaagagagacgac

SEQ ID NO: 41255 - RNA, 21 nt, Artificial Sequence
  GATA2 Guide RNA
cuggccagauucuuucgggcc

SEQ ID NO: 41256 - RNA, 21 nt, Artificial Sequence
  GATA2 Guide RNA
cuggcccgaaagaaucuggcc

SEQ ID NO: 41257 - RNA, 21 nt, Artificial Sequence
  GATA2 Guide RNA
cuggccucugcuuagcucuuu

SEQ ID NO: 41258 - RNA, 21 nt, Artificial Sequence
  GATA2 Guide RNA
cuggcgguuaauuacagggga

SEQ ID NO: 41259 - RNA, 21 nt, Artificial Sequence
  GATA2 Guide RNA
cugggaugucaguuggggucg

SEQ ID NO: 41260 - RNA, 21 nt, Artificial Sequence
  GATA2 Guide RNA
cugggcaggagcuggcgguua

SEQ ID NO: 41261 - RNA, 21 nt, Artificial Sequence
  GATA2 Guide RNA
cuguaauuaaccgccagcucc

SEQ ID NO: 41262 - RNA, 21 nt, Artificial Sequence
  GATA2 Guide RNA
cuguccucuggccucugcuua

SEQ ID NO: 41263 - RNA, 21 nt, Artificial Sequence
  GATA2 Guide RNA
cuucaaaugcagacgcuuugc

SEQ ID NO: 41264 - RNA, 21 nt, Artificial Sequence
  GATA2 Guide RNA
cuucauggcccuauuuuuaaa

SEQ ID NO: 41265 - RNA, 21 nt, Artificial Sequence
  GATA2 Guide RNA
cuucggggaucccggagcaga

SEQ ID NO: 41266 - RNA, 21 nt, Artificial Sequence
  GATA2 Guide RNA
cuugcgccaccccacucugcu

SEQ ID NO: 41267 - RNA, 21 nt, Artificial Sequence
  GATA2 Guide RNA
cuuucgggccagauuuccucc

SEQ ID NO: 41268 - RNA, 21 nt, Artificial Sequence
  GATA2 Guide RNA
cuuucuggccagauucuuucg

SEQ ID NO: 41269 - RNA, 21 nt, Artificial Sequence
  GATA2 Guide RNA
cuuugccgcuugaaauccucu

SEQ ID NO: 41270 - RNA, 21 nt, Artificial Sequence
  GATA2 Guide RNA
cuuuuaucaugaaaagcacug

SEQ ID NO: 41271 - RNA, 21 nt, Artificial Sequence
  GATA2 Guide RNA
gaaaagcacugggaugucagu

SEQ ID NO: 41272 - RNA, 21 nt, Artificial Sequence
  GATA2 Guide RNA
gaaagaaucuggccagaaaga

SEQ ID NO: 41273 - RNA, 21 nt, Artificial Sequence
  GATA2 Guide RNA
gaaagagagacgaccccaacu

SEQ ID NO: 41274 - RNA, 21 nt, Artificial Sequence
  GATA2 Guide RNA
gaaaucuggcccgaaagaauc

SEQ ID NO: 41275 - RNA, 21 nt, Artificial Sequence
  GATA2 Guide RNA
gaaguugaguguccacgggcc

SEQ ID NO: 41276 - RNA, 21 nt, Artificial Sequence
  GATA2 Guide RNA
gaaucuggccagaaagagaga

SEQ ID NO: 41277 - RNA, 21 nt, Artificial Sequence
  GATA2 Guide RNA
gacacucaacuucggggaucc

SEQ ID NO: 41278 - RNA, 21 nt, Artificial Sequence
  GATA2 Guide RNA
gacaggaguccggcccgugga

SEQ ID NO: 41279 - RNA, 21 nt, Artificial Sequence
  GATA2 Guide RNA
gacaucccagugcuuuucaug

SEQ ID NO: 41280 - RNA, 21 nt, Artificial Sequence
  GATA2 Guide RNA
gaccccaacugacaucccagu

SEQ ID NO: 41281 - RNA, 21 nt, Artificial Sequence
  GATA2 Guide RNA
gacgaccccaacugacauccc

SEQ ID NO: 41282 - RNA, 21 nt, Artificial Sequence
  GATA2 Guide RNA
gacgcuuugccgcuugaaauc

SEQ ID NO: 41283 - RNA, 21 nt, Artificial Sequence
  GATA2 Guide RNA
gacuccuguccucuggccucu

SEQ ID NO: 41284 - RNA, 21 nt, Artificial Sequence
  GATA2 Guide RNA
gagacgaccccaacugacauc

SEQ ID NO: 41285 - RNA, 21 nt, Artificial Sequence
  GATA2 Guide RNA
gagagacgaccccaacugaca

SEQ ID NO: 41286 - RNA, 21 nt, Artificial Sequence
  GATA2 Guide RNA
gagcagagugggguggcgcaa

SEQ ID NO: 41287 - RNA, 21 nt, Artificial Sequence
  GATA2 Guide RNA
gagcccaccgggcacccuugc

SEQ ID NO: 41288 - RNA, 21 nt, Artificial Sequence
  GATA2 Guide RNA
gagcuaagcagaggccagagg

SEQ ID NO: 41289 - RNA, 21 nt, Artificial Sequence
  GATA2 Guide RNA
gagcuggcgguuaauuacagg

SEQ ID NO: 41290 - RNA, 21 nt, Artificial Sequence
  GATA2 Guide RNA
gaggaaaucuggcccgaaaga

SEQ ID NO: 41291 - RNA, 21 nt, Artificial Sequence
  GATA2 Guide RNA
gaggacaggaguccggcccgu

SEQ ID NO: 41292 - RNA, 21 nt, Artificial Sequence
  GATA2 Guide RNA
gaggaggaaaucuggcccgaa

SEQ ID NO: 41293 - RNA, 21 nt, Artificial Sequence
  GATA2 Guide RNA
gaggauuucaagcggcaaagc

SEQ ID NO: 41294 - RNA, 21 nt, Artificial Sequence
  GATA2 Guide RNA
gaggccagaggacaggagucc

SEQ ID NO: 41295 - RNA, 21 nt, Artificial Sequence
  GATA2 Guide RNA
gaguccggcccguggacacuc

SEQ ID NO: 41296 - RNA, 21 nt, Artificial Sequence
  GATA2 Guide RNA
gagugggguggcgcaagggug

SEQ ID NO: 41297 - RNA, 21 nt, Artificial Sequence
  GATA2 Guide RNA
gaguguccacgggccggacuc

SEQ ID NO: 41298 - RNA, 21 nt, Artificial Sequence
  GATA2 Guide RNA
gauaaaagaggauuucaagcg

SEQ ID NO: 41299 - RNA, 21 nt, Artificial Sequence
  GATA2 Guide RNA
gauccccgaaguugagugucc

SEQ ID NO: 41300 - RNA, 21 nt, Artificial Sequence
  GATA2 Guide RNA
gaucccggagcagaguggggu

SEQ ID NO: 41301 - RNA, 21 nt, Artificial Sequence
  GATA2 Guide RNA
gaugucaguuggggucgucuc

SEQ ID NO: 41302 - RNA, 21 nt, Artificial Sequence
  GATA2 Guide RNA
gauucuuucgggccagauuuc

SEQ ID NO: 41303 - RNA, 21 nt, Artificial Sequence
  GATA2 Guide RNA
gauuucaagcggcaaagcguc

SEQ ID NO: 41304 - RNA, 21 nt, Artificial Sequence
  GATA2 Guide RNA
gauuuccuccucggguauagg

SEQ ID NO: 41305 - RNA, 21 nt, Artificial Sequence
  GATA2 Guide RNA
gcaaagcgucugcauuugaag

SEQ ID NO: 41306 - RNA, 21 nt, Artificial Sequence
  GATA2 Guide RNA
gcaagggugcccggugggcuc

SEQ ID NO: 41307 - RNA, 21 nt, Artificial Sequence
  GATA2 Guide RNA
gcacccuugcgccaccccacu

SEQ ID NO: 41308 - RNA, 21 nt, Artificial Sequence
  GATA2 Guide RNA
gcacugggaugucaguugggg

SEQ ID NO: 41309 - RNA, 21 nt, Artificial Sequence
  GATA2 Guide RNA
gcagacgcuuugccgcuugaa

SEQ ID NO: 41310 - RNA, 21 nt, Artificial Sequence
  GATA2 Guide RNA
gcagaggccagaggacaggag

SEQ ID NO: 41311 - RNA, 21 nt, Artificial Sequence
  GATA2 Guide RNA
gcagagugggguggcgcaagg

SEQ ID NO: 41312 - RNA, 21 nt, Artificial Sequence
  GATA2 Guide RNA
gcaggagcuggcgguuaauua

SEQ ID NO: 41313 - RNA, 21 nt, Artificial Sequence
  GATA2 Guide RNA
gccaccccacucugcuccggg

SEQ ID NO: 41314 - RNA, 21 nt, Artificial Sequence
  GATA2 Guide RNA
gccagaaagagagacgacccc

SEQ ID NO: 41315 - RNA, 21 nt, Artificial Sequence
  GATA2 Guide RNA
gccagaggacaggaguccggc

SEQ ID NO: 41316 - RNA, 21 nt, Artificial Sequence
  GATA2 Guide RNA
gccagauucuuucgggccaga

SEQ ID NO: 41317 - RNA, 21 nt, Artificial Sequence
  GATA2 Guide RNA
gccagauuuccuccucgggua

SEQ ID NO: 41318 - RNA, 21 nt, Artificial Sequence
  GATA2 Guide RNA
gcccgaaagaaucuggccaga

SEQ ID NO: 41319 - RNA, 21 nt, Artificial Sequence
  GATA2 Guide RNA
gcccggugggcucccuauacc

SEQ ID NO: 41320 - RNA, 21 nt, Artificial Sequence
  GATA2 Guide RNA
gcccguggacacucaacuucg

SEQ ID NO: 41321 - RNA, 21 nt, Artificial Sequence
  GATA2 Guide RNA
gcccuauuuuuaaaaaagagc

SEQ ID NO: 41322 - RNA, 21 nt, Artificial Sequence
  GATA2 Guide RNA
gccgcuugaaauccucuuuua

SEQ ID NO: 41323 - RNA, 21 nt, Artificial Sequence
  GATA2 Guide RNA
gccggacuccuguccucuggc

SEQ ID NO: 41324 - RNA, 21 nt, Artificial Sequence
  GATA2 Guide RNA
gccucugcuuagcucuuuuuu

SEQ ID NO: 41325 - RNA, 21 nt, Artificial Sequence
  GATA2 Guide RNA
gcgccaccccacucugcuccg

SEQ ID NO: 41326 - RNA, 21 nt, Artificial Sequence
  GATA2 Guide RNA
gcggcaaagcgucugcauuug

SEQ ID NO: 41327 - RNA, 21 nt, Artificial Sequence
  GATA2 Guide RNA
gcgguuaauuacaggggaaaa

SEQ ID NO: 41328 - RNA, 21 nt, Artificial Sequence
  GATA2 Guide RNA
gcgucugcauuugaaggaguu

SEQ ID NO: 41329 - RNA, 21 nt, Artificial Sequence
  GATA2 Guide RNA
gcuaagcagaggccagaggac

SEQ ID NO: 41330 - RNA, 21 nt, Artificial Sequence
  GATA2 Guide RNA
gcucccuauacccgaggagga

SEQ ID NO: 41331 - RNA, 21 nt, Artificial Sequence
  GATA2 Guide RNA
gcuccgggauccccgaaguug

SEQ ID NO: 41332 - RNA, 21 nt, Artificial Sequence
  GATA2 Guide RNA
gcucuuuuuuaaaaauagggc

SEQ ID NO: 41333 - RNA, 21 nt, Artificial Sequence
  GATA2 Guide RNA
gcugcugggcaggagcuggcg

SEQ ID NO: 41334 - RNA, 21 nt, Artificial Sequence
  GATA2 Guide RNA
gcuggcgguuaauuacagggg

SEQ ID NO: 41335 - RNA, 21 nt, Artificial Sequence
  GATA2 Guide RNA
gcugggcaggagcuggcgguu

SEQ ID NO: 41336 - RNA, 21 nt, Artificial Sequence
  GATA2 Guide RNA
gcuugaaauccucuuuuauca

SEQ ID NO: 41337 - RNA, 21 nt, Artificial Sequence
  GATA2 Guide RNA
gcuuugccgcuugaaauccuc

SEQ ID NO: 41338 - RNA, 21 nt, Artificial Sequence
  GATA2 Guide RNA
gcuuuucaugauaaaagagga

SEQ ID NO: 41339 - RNA, 21 nt, Artificial Sequence
  GATA2 Guide RNA
ggaaaucuggcccgaaagaau

SEQ ID NO: 41340 - RNA, 21 nt, Artificial Sequence
  GATA2 Guide RNA
ggacacucaacuucggggauc

SEQ ID NO: 41341 - RNA, 21 nt, Artificial Sequence
  GATA2 Guide RNA
ggacaggaguccggcccgugg

SEQ ID NO: 41342 - RNA, 21 nt, Artificial Sequence
  GATA2 Guide RNA
ggacuccuguccucuggccuc

SEQ ID NO: 41343 - RNA, 21 nt, Artificial Sequence
  GATA2 Guide RNA
ggagcagagugggguggcgca

SEQ ID NO: 41344 - RNA, 21 nt, Artificial Sequence
  GATA2 Guide RNA
ggagcccaccgggcacccuug

SEQ ID NO: 41345 - RNA, 21 nt, Artificial Sequence
  GATA2 Guide RNA
ggagcuggcgguuaauuacag

SEQ ID NO: 41346 - RNA, 21 nt, Artificial Sequence
  GATA2 Guide RNA
ggaggaaaucuggcccgaaag

SEQ ID NO: 41347 - RNA, 21 nt, Artificial Sequence
  GATA2 Guide RNA
ggaguccggcccguggacacu

SEQ ID NO: 41348 - RNA, 21 nt, Artificial Sequence
  GATA2 Guide RNA
ggauccccgaaguugaguguc

SEQ ID NO: 41349 - RNA, 21 nt, Artificial Sequence
  GATA2 Guide RNA
ggaucccggagcagagugggg

SEQ ID NO: 41350 - RNA, 21 nt, Artificial Sequence
  GATA2 Guide RNA
ggaugucaguuggggucgucu

SEQ ID NO: 41351 - RNA, 21 nt, Artificial Sequence
  GATA2 Guide RNA
ggauuucaagcggcaaagcgu

SEQ ID NO: 41352 - RNA, 21 nt, Artificial Sequence
  GATA2 Guide RNA
ggcaaagcgucugcauuugaa

SEQ ID NO: 41353 - RNA, 21 nt, Artificial Sequence
  GATA2 Guide RNA
ggcacccuugcgccaccccac

SEQ ID NO: 41354 - RNA, 21 nt, Artificial Sequence
  GATA2 Guide RNA
ggcaggagcuggcgguuaauu

SEQ ID NO: 41355 - RNA, 21 nt, Artificial Sequence
  GATA2 Guide RNA
ggccagaaagagagacgaccc

SEQ ID NO: 41356 - RNA, 21 nt, Artificial Sequence
  GATA2 Guide RNA
ggccagaggacaggaguccgg

SEQ ID NO: 41357 - RNA, 21 nt, Artificial Sequence
  GATA2 Guide RNA
ggccagauucuuucgggccag

SEQ ID NO: 41358 - RNA, 21 nt, Artificial Sequence
  GATA2 Guide RNA
ggccagauuuccuccucgggu

SEQ ID NO: 41359 - RNA, 21 nt, Artificial Sequence
  GATA2 Guide RNA
ggcccgaaagaaucuggccag

SEQ ID NO: 41360 - RNA, 21 nt, Artificial Sequence
  GATA2 Guide RNA
ggcccguggacacucaacuuc

SEQ ID NO: 41361 - RNA, 21 nt, Artificial Sequence
  GATA2 Guide RNA
ggcccuauuuuuaaaaaagag

SEQ ID NO: 41362 - RNA, 21 nt, Artificial Sequence
  GATA2 Guide RNA
ggccggacuccuguccucugg

SEQ ID NO: 41363 - RNA, 21 nt, Artificial Sequence
  GATA2 Guide RNA
ggccucugcuuagcucuuuuu

SEQ ID NO: 41364 - RNA, 21 nt, Artificial Sequence
  GATA2 Guide RNA
ggcgguuaauuacaggggaaa

SEQ ID NO: 41365 - RNA, 21 nt, Artificial Sequence
  GATA2 Guide RNA
ggcucccuauacccgaggagg

SEQ ID NO: 41366 - RNA, 21 nt, Artificial Sequence
  GATA2 Guide RNA
ggcugcugggcaggagcuggc

SEQ ID NO: 41367 - RNA, 21 nt, Artificial Sequence
  GATA2 Guide RNA
gggagcccaccgggcacccuu

SEQ ID NO: 41368 - RNA, 21 nt, Artificial Sequence
  GATA2 Guide RNA
gggauccccgaaguugagugu

SEQ ID NO: 41369 - RNA, 21 nt, Artificial Sequence
  GATA2 Guide RNA
gggaucccggagcagaguggg

SEQ ID NO: 41370 - RNA, 21 nt, Artificial Sequence
  GATA2 Guide RNA
gggaugucaguuggggucguc

SEQ ID NO: 41371 - RNA, 21 nt, Artificial Sequence
  GATA2 Guide RNA
gggcacccuugcgccacccca

SEQ ID NO: 41372 - RNA, 21 nt, Artificial Sequence
  GATA2 Guide RNA
gggcaggagcuggcgguuaau

SEQ ID NO: 41373 - RNA, 21 nt, Artificial Sequence
  GATA2 Guide RNA
gggccagauuuccuccucggg

SEQ ID NO: 41374 - RNA, 21 nt, Artificial Sequence
  GATA2 Guide RNA
gggccggacuccuguccucug

SEQ ID NO: 41375 - RNA, 21 nt, Artificial Sequence
  GATA2 Guide RNA
gggcucccuauacccgaggag

SEQ ID NO: 41376 - RNA, 21 nt, Artificial Sequence
  GATA2 Guide RNA
gggcugcugggcaggagcugg

SEQ ID NO: 41377 - RNA, 21 nt, Artificial Sequence
  GATA2 Guide RNA
ggggaucccggagcagagugg

SEQ ID NO: 41378 - RNA, 21 nt, Artificial Sequence
  GATA2 Guide RNA
ggggcugcugggcaggagcug

SEQ ID NO: 41379 - RNA, 21 nt, Artificial Sequence
  GATA2 Guide RNA
gggggcugcugggcaggagcu

SEQ ID NO: 41380 - RNA, 21 nt, Artificial Sequence
  GATA2 Guide RNA
ggggucgucucucuuucuggc

SEQ ID NO: 41381 - RNA, 21 nt, Artificial Sequence
  GATA2 Guide RNA
ggguauagggagcccaccggg

SEQ ID NO: 41382 - RNA, 21 nt, Artificial Sequence
  GATA2 Guide RNA
gggucgucucucuuucuggcc

SEQ ID NO: 41383 - RNA, 21 nt, Artificial Sequence
  GATA2 Guide RNA
gggugcccggugggcucccua

SEQ ID NO: 41384 - RNA, 21 nt, Artificial Sequence
  GATA2 Guide RNA
gguauagggagcccaccgggc

SEQ ID NO: 41385 - RNA, 21 nt, Artificial Sequence
  GATA2 Guide RNA
ggucgucucucuuucuggcca

SEQ ID NO: 41386 - RNA, 21 nt, Artificial Sequence
  GATA2 Guide RNA
ggugcccggugggcucccuau

SEQ ID NO: 41387 - RNA, 21 nt, Artificial Sequence
  GATA2 Guide RNA
gguggcgcaagggugcccggu

SEQ ID NO: 41388 - RNA, 21 nt, Artificial Sequence
  GATA2 Guide RNA
ggugggcucccuauacccgag

SEQ ID NO: 41389 - RNA, 21 nt, Artificial Sequence
  GATA2 Guide RNA
gguuaauuacaggggaaaaaa

SEQ ID NO: 41390 - RNA, 21 nt, Artificial Sequence
  GATA2 Guide RNA
guaauuaaccgccagcuccug

SEQ ID NO: 41391 - RNA, 21 nt, Artificial Sequence
  GATA2 Guide RNA
guacuucauggcccuauuuuu

SEQ ID NO: 41392 - RNA, 21 nt, Artificial Sequence
  GATA2 Guide RNA
guauagggagcccaccgggca

SEQ ID NO: 41393 - RNA, 21 nt, Artificial Sequence
  GATA2 Guide RNA
gucaguuggggucgucucucu

SEQ ID NO: 41394 - RNA, 21 nt, Artificial Sequence
  GATA2 Guide RNA
guccacgggccggacuccugu

SEQ ID NO: 41395 - RNA, 21 nt, Artificial Sequence
  GATA2 Guide RNA
guccggcccguggacacucaa

SEQ ID NO: 41396 - RNA, 21 nt, Artificial Sequence
  GATA2 Guide RNA
guccucuggccucugcuuagc

SEQ ID NO: 41397 - RNA, 21 nt, Artificial Sequence
  GATA2 Guide RNA
gucgucucucuuucuggccag

SEQ ID NO: 41398 - RNA, 21 nt, Artificial Sequence
  GATA2 Guide RNA
gucucucuuucuggccagauu

SEQ ID NO: 41399 - RNA, 21 nt, Artificial Sequence
  GATA2 Guide RNA
gucugcauuugaaggaguuuu

SEQ ID NO: 41400 - RNA, 21 nt, Artificial Sequence
  GATA2 Guide RNA
gugcccggugggcucccuaua

SEQ ID NO: 41401 - RNA, 21 nt, Artificial Sequence
  GATA2 Guide RNA
gugcuuuucaugauaaaagag

SEQ ID NO: 41402 - RNA, 21 nt, Artificial Sequence
  GATA2 Guide RNA
guggacacucaacuucgggga

SEQ ID NO: 41403 - RNA, 21 nt, Artificial Sequence
  GATA2 Guide RNA
guggcgcaagggugcccggug

SEQ ID NO: 41404 - RNA, 21 nt, Artificial Sequence
  GATA2 Guide RNA
gugggcucccuauacccgagg

SEQ ID NO: 41405 - RNA, 21 nt, Artificial Sequence
  GATA2 Guide RNA
gugggguggcgcaagggugcc

SEQ ID NO: 41406 - RNA, 21 nt, Artificial Sequence
  GATA2 Guide RNA
guguccacgggccggacuccu

SEQ ID NO: 41407 - RNA, 21 nt, Artificial Sequence
  GATA2 Guide RNA
guugaguguccacgggccgga

SEQ ID NO: 41408 - RNA, 21 nt, Artificial Sequence
  GATA2 Guide RNA
guuggggucgucucucuuucu

SEQ ID NO: 41409 - RNA, 21 nt, Artificial Sequence
  GATA2 Guide RNA
uaaaaaagagcuaagcagagg

SEQ ID NO: 41410 - RNA, 21 nt, Artificial Sequence
  GATA2 Guide RNA
uaaaaauagggccaugaagua

SEQ ID NO: 41411 - RNA, 21 nt, Artificial Sequence
  GATA2 Guide RNA
uaaaagaggauuucaagcggc

SEQ ID NO: 41412 - RNA, 21 nt, Artificial Sequence
  GATA2 Guide RNA
uaaccgccagcuccugcccag

SEQ ID NO: 41413 - RNA, 21 nt, Artificial Sequence
  GATA2 Guide RNA
uaagcagaggccagaggacag

SEQ ID NO: 41414 - RNA, 21 nt, Artificial Sequence
  GATA2 Guide RNA
uaauuaaccgccagcuccugc

SEQ ID NO: 41415 - RNA, 21 nt, Artificial Sequence
  GATA2 Guide RNA
uacccgaggaggaaaucuggc

SEQ ID NO: 41416 - RNA, 21 nt, Artificial Sequence
  GATA2 Guide RNA
uacuucauggcccuauuuuua

SEQ ID NO: 41417 - RNA, 21 nt, Artificial Sequence
  GATA2 Guide RNA
uagggagcccaccgggcaccc

SEQ ID NO: 41418 - RNA, 21 nt, Artificial Sequence
  GATA2 Guide RNA
uauacccgaggaggaaaucug

SEQ ID NO: 41419 - RNA, 21 nt, Artificial Sequence
  GATA2 Guide RNA
uauagggagcccaccgggcac

SEQ ID NO: 41420 - RNA, 21 nt, Artificial Sequence
  GATA2 Guide RNA
uaucaugaaaagcacugggau

SEQ ID NO: 41421 - RNA, 21 nt, Artificial Sequence
  GATA2 Guide RNA
ucaaaugcagacgcuuugccg

SEQ ID NO: 41422 - RNA, 21 nt, Artificial Sequence
  GATA2 Guide RNA
ucaacuucggggaucccggag

SEQ ID NO: 41423 - RNA, 21 nt, Artificial Sequence
  GATA2 Guide RNA
ucaagcggcaaagcgucugca

SEQ ID NO: 41424 - RNA, 21 nt, Artificial Sequence
  GATA2 Guide RNA
ucaguuggggucgucucucuu

SEQ ID NO: 41425 - RNA, 21 nt, Artificial Sequence
  GATA2 Guide RNA
ucaugaaaagcacugggaugu

SEQ ID NO: 41426 - RNA, 21 nt, Artificial Sequence
  GATA2 Guide RNA
uccacgggccggacuccuguc

SEQ ID NO: 41427 - RNA, 21 nt, Artificial Sequence
  GATA2 Guide RNA
ucccagugcuuuucaugauaa

SEQ ID NO: 41428 - RNA, 21 nt, Artificial Sequence
  GATA2 Guide RNA
uccccgaaguugaguguccac

SEQ ID NO: 41429 - RNA, 21 nt, Artificial Sequence
  GATA2 Guide RNA
uccccuguaauuaaccgccag

SEQ ID NO: 41430 - RNA, 21 nt, Artificial Sequence
  GATA2 Guide RNA
ucccggagcagaguggggugg

SEQ ID NO: 41431 - RNA, 21 nt, Artificial Sequence
  GATA2 Guide RNA
ucccuauacccgaggaggaaa

SEQ ID NO: 41432 - RNA, 21 nt, Artificial Sequence
  GATA2 Guide RNA
uccggcccguggacacucaac

SEQ ID NO: 41433 - RNA, 21 nt, Artificial Sequence
  GATA2 Guide RNA
uccgggauccccgaaguugag

SEQ ID NO: 41434 - RNA, 21 nt, Artificial Sequence
  GATA2 Guide RNA
uccuccucggguauagggagc

SEQ ID NO: 41435 - RNA, 21 nt, Artificial Sequence
  GATA2 Guide RNA
uccucggguauagggagccca

SEQ ID NO: 41436 - RNA, 21 nt, Artificial Sequence
  GATA2 Guide RNA
uccucuggccucugcuuagcu

SEQ ID NO: 41437 - RNA, 21 nt, Artificial Sequence
  GATA2 Guide RNA
uccucuuuuaucaugaaaagc

SEQ ID NO: 41438 - RNA, 21 nt, Artificial Sequence
  GATA2 Guide RNA
uccuguccucuggccucugcu

SEQ ID NO: 41439 - RNA, 21 nt, Artificial Sequence
  GATA2 Guide RNA
uccuucaaaugcagacgcuuu

SEQ ID NO: 41440 - RNA, 21 nt, Artificial Sequence
  GATA2 Guide RNA
ucgggccagauuuccuccucg

SEQ ID NO: 41441 - RNA, 21 nt, Artificial Sequence
  GATA2 Guide RNA
ucggggaucccggagcagagu

SEQ ID NO: 41442 - RNA, 21 nt, Artificial Sequence
  GATA2 Guide RNA
ucggguauagggagcccaccg

SEQ ID NO: 41443 - RNA, 21 nt, Artificial Sequence
  GATA2 Guide RNA
ucgucucucuuucuggccaga

SEQ ID NO: 41444 - RNA, 21 nt, Artificial Sequence
  GATA2 Guide RNA
ucucucuuucuggccagauuc

SEQ ID NO: 41445 - RNA, 21 nt, Artificial Sequence
  GATA2 Guide RNA
ucucuuucuggccagauucuu

SEQ ID NO: 41446 - RNA, 21 nt, Artificial Sequence
  GATA2 Guide RNA
ucugcauuugaaggaguuuuu

SEQ ID NO: 41447 - RNA, 21 nt, Artificial Sequence
  GATA2 Guide RNA
ucugcuccgggauccccgaag

SEQ ID NO: 41448 - RNA, 21 nt, Artificial Sequence
  GATA2 Guide RNA
ucuggccagaaagagagacga

SEQ ID NO: 41449 - RNA, 21 nt, Artificial Sequence
  GATA2 Guide RNA
ucuggccagauucuuucgggc

SEQ ID NO: 41450 - RNA, 21 nt, Artificial Sequence
  GATA2 Guide RNA
ucuggcccgaaagaaucuggc

SEQ ID NO: 41451 - RNA, 21 nt, Artificial Sequence
  GATA2 Guide RNA
ucuggccucugcuuagcucuu

SEQ ID NO: 41452 - RNA, 21 nt, Artificial Sequence
  GATA2 Guide RNA
ucuuucgggccagauuuccuc

SEQ ID NO: 41453 - RNA, 21 nt, Artificial Sequence
  GATA2 Guide RNA
ucuuucuggccagauucuuuc

SEQ ID NO: 41454 - RNA, 21 nt, Artificial Sequence
  GATA2 Guide RNA
ugaaaagcacugggaugucag

SEQ ID NO: 41455 - RNA, 21 nt, Artificial Sequence
  GATA2 Guide RNA
ugacaucccagugcuuuucau

SEQ ID NO: 41456 - RNA, 21 nt, Artificial Sequence
  GATA2 Guide RNA
ugaguguccacgggccggacu

SEQ ID NO: 41457 - RNA, 21 nt, Artificial Sequence
  GATA2 Guide RNA
ugauaaaagaggauuucaagc

SEQ ID NO: 41458 - RNA, 21 nt, Artificial Sequence
  GATA2 Guide RNA
ugcagacgcuuugccgcuuga

SEQ ID NO: 41459 - RNA, 21 nt, Artificial Sequence
  GATA2 Guide RNA
ugcccggugggcucccuauac

SEQ ID NO: 41460 - RNA, 21 nt, Artificial Sequence
  GATA2 Guide RNA
ugccgcuugaaauccucuuuu

SEQ ID NO: 41461 - RNA, 21 nt, Artificial Sequence
  GATA2 Guide RNA
ugcgccaccccacucugcucc

SEQ ID NO: 41462 - RNA, 21 nt, Artificial Sequence
  GATA2 Guide RNA
ugcuccgggauccccgaaguu

SEQ ID NO: 41463 - RNA, 21 nt, Artificial Sequence
  GATA2 Guide RNA
ugcugggcaggagcuggcggu

SEQ ID NO: 41464 - RNA, 21 nt, Artificial Sequence
  GATA2 Guide RNA
ugcuuuucaugauaaaagagg

SEQ ID NO: 41465 - RNA, 21 nt, Artificial Sequence
  GATA2 Guide RNA
uggacacucaacuucggggau

SEQ ID NO: 41466 - RNA, 21 nt, Artificial Sequence
  GATA2 Guide RNA
uggccagaaagagagacgacc

SEQ ID NO: 41467 - RNA, 21 nt, Artificial Sequence
  GATA2 Guide RNA
uggccagauucuuucgggcca

SEQ ID NO: 41468 - RNA, 21 nt, Artificial Sequence
  GATA2 Guide RNA
uggcccgaaagaaucuggcca

SEQ ID NO: 41469 - RNA, 21 nt, Artificial Sequence
  GATA2 Guide RNA
uggccucugcuuagcucuuuu

SEQ ID NO: 41470 - RNA, 21 nt, Artificial Sequence
  GATA2 Guide RNA
uggcgcaagggugcccggugg

SEQ ID NO: 41471 - RNA, 21 nt, Artificial Sequence
  GATA2 Guide RNA
uggcgguuaauuacaggggaa

SEQ ID NO: 41472 - RNA, 21 nt, Artificial Sequence
  GATA2 Guide RNA
ugggaugucaguuggggucgu

SEQ ID NO: 41473 - RNA, 21 nt, Artificial Sequence
  GATA2 Guide RNA
ugggcaggagcuggcgguuaa

SEQ ID NO: 41474 - RNA, 21 nt, Artificial Sequence
  GATA2 Guide RNA
ugggcucccuauacccgagga

SEQ ID NO: 41475 - RNA, 21 nt, Artificial Sequence
  GATA2 Guide RNA
uggggucgucucucuuucugg

SEQ ID NO: 41476 - RNA, 21 nt, Artificial Sequence
  GATA2 Guide RNA
ugggguggcgcaagggugccc

SEQ ID NO: 41477 - RNA, 21 nt, Artificial Sequence
  GATA2 Guide RNA
uguaauuaaccgccagcuccu

SEQ ID NO: 41478 - RNA, 21 nt, Artificial Sequence
  GATA2 Guide RNA
ugucaguuggggucgucucuc

SEQ ID NO: 41479 - RNA, 21 nt, Artificial Sequence
  GATA2 Guide RNA
uguccacgggccggacuccug

SEQ ID NO: 41480 - RNA, 21 nt, Artificial Sequence
  GATA2 Guide RNA
uguccucuggccucugcuuag

SEQ ID NO: 41481 - RNA, 21 nt, Artificial Sequence
  GATA2 Guide RNA
uuaaaaaagagcuaagcagag

SEQ ID NO: 41482 - RNA, 21 nt, Artificial Sequence
  GATA2 Guide RNA
uuaaaaauagggccaugaagu

SEQ ID NO: 41483 - RNA, 21 nt, Artificial Sequence
  GATA2 Guide RNA
uuaaccgccagcuccugccca

SEQ ID NO: 41484 - RNA, 21 nt, Artificial Sequence
  GATA2 Guide RNA
uuaucaugaaaagcacuggga

SEQ ID NO: 41485 - RNA, 21 nt, Artificial Sequence
  GATA2 Guide RNA
uucaaaugcagacgcuuugcc

SEQ ID NO: 41486 - RNA, 21 nt, Artificial Sequence
  GATA2 Guide RNA
uucaagcggcaaagcgucugc

SEQ ID NO: 41487 - RNA, 21 nt, Artificial Sequence
  GATA2 Guide RNA
uuccccuguaauuaaccgcca

SEQ ID NO: 41488 - RNA, 21 nt, Artificial Sequence
  GATA2 Guide RNA
uuccuccucggguauagggag

SEQ ID NO: 41489 - RNA, 21 nt, Artificial Sequence
  GATA2 Guide RNA
uucgggccagauuuccuccuc

SEQ ID NO: 41490 - RNA, 21 nt, Artificial Sequence
  GATA2 Guide RNA
uucggggaucccggagcagag

SEQ ID NO: 41491 - RNA, 21 nt, Artificial Sequence
  GATA2 Guide RNA
uucuggccagauucuuucggg

SEQ ID NO: 41492 - RNA, 21 nt, Artificial Sequence
  GATA2 Guide RNA
uucuuucgggccagauuuccu

SEQ ID NO: 41493 - RNA, 21 nt, Artificial Sequence
  GATA2 Guide RNA
uugaguguccacgggccggac

SEQ ID NO: 41494 - RNA, 21 nt, Artificial Sequence
  GATA2 Guide RNA
uugccgcuugaaauccucuuu

SEQ ID NO: 41495 - RNA, 21 nt, Artificial Sequence
  GATA2 Guide RNA
uugcgccaccccacucugcuc

SEQ ID NO: 41496 - RNA, 21 nt, Artificial Sequence
  GATA2 Guide RNA
uuggggucgucucucuuucug

SEQ ID NO: 41497 - RNA, 21 nt, Artificial Sequence
  GATA2 Guide RNA
uuuaaaaauagggccaugaag

SEQ ID NO: 41498 - RNA, 21 nt, Artificial Sequence
  GATA2 Guide RNA
uuuaucaugaaaagcacuggg

SEQ ID NO: 41499 - RNA, 21 nt, Artificial Sequence
  GATA2 Guide RNA
uuucaagcggcaaagcgucug

SEQ ID NO: 41500 - RNA, 21 nt, Artificial Sequence
  GATA2 Guide RNA
uuuccccuguaauuaaccgcc

SEQ ID NO: 41501 - RNA, 21 nt, Artificial Sequence
  GATA2 Guide RNA
uuuccuccucggguauaggga

SEQ ID NO: 41502 - RNA, 21 nt, Artificial Sequence
  GATA2 Guide RNA
uuucgggccagauuuccuccu

SEQ ID NO: 41503 - RNA, 21 nt, Artificial Sequence
  GATA2 Guide RNA
uuucuggccagauucuuucgg

SEQ ID NO: 41504 - RNA, 21 nt, Artificial Sequence
  GATA2 Guide RNA
uuugccgcuugaaauccucuu

SEQ ID NO: 41505 - RNA, 21 nt, Artificial Sequence
  GATA2 Guide RNA
uuuuaucaugaaaagcacugg

SEQ ID NO: 41506 - RNA, 21 nt, Artificial Sequence
  GATA2 Guide RNA
uuuuccccuguaauuaaccgc

SEQ ID NO: 41507 - RNA, 21 nt, Artificial Sequence
  GATA2 Guide RNA
uuuuuccccuguaauuaaccg

SEQ ID NO: 41508 - RNA, 21 nt, Artificial Sequence
  GATA2 Guide RNA
uuuuuuccccuguaauuaacc

SEQ ID NO: 41509 - RNA, 22 nt, Artificial Sequence
  GATA2 Guide RNA
aaaaaacuccuucaaaugcaga

SEQ ID NO: 41510 - RNA, 22 nt, Artificial Sequence
  GATA2 Guide RNA
aaaaaagagcuaagcagaggcc

SEQ ID NO: 41511 - RNA, 22 nt, Artificial Sequence
  GATA2 Guide RNA
aaaaacuccuucaaaugcagac

SEQ ID NO: 41512 - RNA, 22 nt, Artificial Sequence
  GATA2 Guide RNA
aaaaagagcuaagcagaggcca

SEQ ID NO: 41513 - RNA, 22 nt, Artificial Sequence
  GATA2 Guide RNA
aaaacuccuucaaaugcagacg

SEQ ID NO: 41514 - RNA, 22 nt, Artificial Sequence
  GATA2 Guide RNA
aaaagagcuaagcagaggccag

SEQ ID NO: 41515 - RNA, 22 nt, Artificial Sequence
  GATA2 Guide RNA
aaaagaggauuucaagcggcaa

SEQ ID NO: 41516 - RNA, 22 nt, Artificial Sequence
  GATA2 Guide RNA
aaaagcacugggaugucaguug

SEQ ID NO: 41517 - RNA, 22 nt, Artificial Sequence
  GATA2 Guide RNA
aaaaguacuucauggcccuauu

SEQ ID NO: 41518 - RNA, 22 nt, Artificial Sequence
  GATA2 Guide RNA
aaacuccuucaaaugcagacgc

SEQ ID NO: 41519 - RNA, 22 nt, Artificial Sequence
  GATA2 Guide RNA
aaagaaucuggccagaaagaga

SEQ ID NO: 41520 - RNA, 22 nt, Artificial Sequence
  GATA2 Guide RNA
aaagagagacgaccccaacuga

SEQ ID NO: 41521 - RNA, 22 nt, Artificial Sequence
  GATA2 Guide RNA
aaagagcuaagcagaggccaga

SEQ ID NO: 41522 - RNA, 22 nt, Artificial Sequence
  GATA2 Guide RNA
aaagaggauuucaagcggcaaa

SEQ ID NO: 41523 - RNA, 22 nt, Artificial Sequence
  GATA2 Guide RNA
aaagcacugggaugucaguugg

SEQ ID NO: 41524 - RNA, 22 nt, Artificial Sequence
  GATA2 Guide RNA
aaagcgucugcauuugaaggag

SEQ ID NO: 41525 - RNA, 22 nt, Artificial Sequence
  GATA2 Guide RNA
aaaguacuucauggcccuauuu

SEQ ID NO: 41526 - RNA, 22 nt, Artificial Sequence
  GATA2 Guide RNA
aaaucuggcccgaaagaaucug

SEQ ID NO: 41527 - RNA, 22 nt, Artificial Sequence
  GATA2 Guide RNA
aaaugcagacgcuuugccgcuu

SEQ ID NO: 41528 - RNA, 22 nt, Artificial Sequence
  GATA2 Guide RNA
aaccgccagcuccugcccagca

SEQ ID NO: 41529 - RNA, 22 nt, Artificial Sequence
  GATA2 Guide RNA
aacuccuucaaaugcagacgcu

SEQ ID NO: 41530 - RNA, 22 nt, Artificial Sequence
  GATA2 Guide RNA
aacugacaucccagugcuuuuc

SEQ ID NO: 41531 - RNA, 22 nt, Artificial Sequence
  GATA2 Guide RNA
aacuucggggaucccggagcag

SEQ ID NO: 41532 - RNA, 22 nt, Artificial Sequence
  GATA2 Guide RNA
aagaaucuggccagaaagagag

SEQ ID NO: 41533 - RNA, 22 nt, Artificial Sequence
  GATA2 Guide RNA
aagagagacgaccccaacugac

SEQ ID NO: 41534 - RNA, 22 nt, Artificial Sequence
  GATA2 Guide RNA
aagagcuaagcagaggccagag

SEQ ID NO: 41535 - RNA, 22 nt, Artificial Sequence
  GATA2 Guide RNA
aagaggauuucaagcggcaaag

SEQ ID NO: 41536 - RNA, 22 nt, Artificial Sequence
  GATA2 Guide RNA
aagcacugggaugucaguuggg

SEQ ID NO: 41537 - RNA, 22 nt, Artificial Sequence
  GATA2 Guide RNA
aagcagaggccagaggacagga

SEQ ID NO: 41538 - RNA, 22 nt, Artificial Sequence
  GATA2 Guide RNA
aagcggcaaagcgucugcauuu

SEQ ID NO: 41539 - RNA, 22 nt, Artificial Sequence
  GATA2 Guide RNA
aagcgucugcauuugaaggagu

SEQ ID NO: 41540 - RNA, 22 nt, Artificial Sequence
  GATA2 Guide RNA
aagggugcccggugggcucccu

SEQ ID NO: 41541 - RNA, 22 nt, Artificial Sequence
  GATA2 Guide RNA
aaguacuucauggcccuauuuu

SEQ ID NO: 41542 - RNA, 22 nt, Artificial Sequence
  GATA2 Guide RNA
aaguugaguguccacgggccgg

SEQ ID NO: 41543 - RNA, 22 nt, Artificial Sequence
  GATA2 Guide RNA
aaucuggccagaaagagagacg

SEQ ID NO: 41544 - RNA, 22 nt, Artificial Sequence
  GATA2 Guide RNA
aaucuggcccgaaagaaucugg

SEQ ID NO: 41545 - RNA, 22 nt, Artificial Sequence
  GATA2 Guide RNA
aaugcagacgcuuugccgcuug

SEQ ID NO: 41546 - RNA, 22 nt, Artificial Sequence
  GATA2 Guide RNA
aauuaaccgccagcuccugccc

SEQ ID NO: 41547 - RNA, 22 nt, Artificial Sequence
  GATA2 Guide RNA
acacucaacuucggggaucccg

SEQ ID NO: 41548 - RNA, 22 nt, Artificial Sequence
  GATA2 Guide RNA
acaggaguccggcccguggaca

SEQ ID NO: 41549 - RNA, 22 nt, Artificial Sequence
  GATA2 Guide RNA
acaucccagugcuuuucaugau

SEQ ID NO: 41550 - RNA, 22 nt, Artificial Sequence
  GATA2 Guide RNA
accccaacugacaucccagugc

SEQ ID NO: 41551 - RNA, 22 nt, Artificial Sequence
  GATA2 Guide RNA
accccacucugcuccgggaucc

SEQ ID NO: 41552 - RNA, 22 nt, Artificial Sequence
  GATA2 Guide RNA
acccgaggaggaaaucuggccc

SEQ ID NO: 41553 - RNA, 22 nt, Artificial Sequence
  GATA2 Guide RNA
acccuugcgccaccccacucug

SEQ ID NO: 41554 - RNA, 22 nt, Artificial Sequence
  GATA2 Guide RNA
accgccagcuccugcccagcag

SEQ ID NO: 41555 - RNA, 22 nt, Artificial Sequence
  GATA2 Guide RNA
accgggcacccuugcgccaccc

SEQ ID NO: 41556 - RNA, 22 nt, Artificial Sequence
  GATA2 Guide RNA
acgaccccaacugacaucccag

SEQ ID NO: 41557 - RNA, 22 nt, Artificial Sequence
  GATA2 Guide RNA
acgcuuugccgcuugaaauccu

SEQ ID NO: 41558 - RNA, 22 nt, Artificial Sequence
  GATA2 Guide RNA
acgggccggacuccuguccucu

SEQ ID NO: 41559 - RNA, 22 nt, Artificial Sequence
  GATA2 Guide RNA
acucaacuucggggaucccgga

SEQ ID NO: 41560 - RNA, 22 nt, Artificial Sequence
  GATA2 Guide RNA
acuccuguccucuggccucugc

SEQ ID NO: 41561 - RNA, 22 nt, Artificial Sequence
  GATA2 Guide RNA
acuccuucaaaugcagacgcuu

SEQ ID NO: 41562 - RNA, 22 nt, Artificial Sequence
  GATA2 Guide RNA
acucugcuccgggauccccgaa

SEQ ID NO: 41563 - RNA, 22 nt, Artificial Sequence
  GATA2 Guide RNA
acugacaucccagugcuuuuca

SEQ ID NO: 41564 - RNA, 22 nt, Artificial Sequence
  GATA2 Guide RNA
acugggaugucaguuggggucg

SEQ ID NO: 41565 - RNA, 22 nt, Artificial Sequence
  GATA2 Guide RNA
acuucauggcccuauuuuuaaa

SEQ ID NO: 41566 - RNA, 22 nt, Artificial Sequence
  GATA2 Guide RNA
acuucggggaucccggagcaga

SEQ ID NO: 41567 - RNA, 22 nt, Artificial Sequence
  GATA2 Guide RNA
agaaagagagacgaccccaacu

SEQ ID NO: 41568 - RNA, 22 nt, Artificial Sequence
  GATA2 Guide RNA
agaaucuggccagaaagagaga

SEQ ID NO: 41569 - RNA, 22 nt, Artificial Sequence
  GATA2 Guide RNA
agacgaccccaacugacauccc

SEQ ID NO: 41570 - RNA, 22 nt, Artificial Sequence
  GATA2 Guide RNA
agacgcuuugccgcuugaaauc

SEQ ID NO: 41571 - RNA, 22 nt, Artificial Sequence
  GATA2 Guide RNA
agagacgaccccaacugacauc

SEQ ID NO: 41572 - RNA, 22 nt, Artificial Sequence
  GATA2 Guide RNA
agagagacgaccccaacugaca

SEQ ID NO: 41573 - RNA, 22 nt, Artificial Sequence
  GATA2 Guide RNA
agagcuaagcagaggccagagg

SEQ ID NO: 41574 - RNA, 22 nt, Artificial Sequence
  GATA2 Guide RNA
agaggacaggaguccggcccgu

SEQ ID NO: 41575 - RNA, 22 nt, Artificial Sequence
  GATA2 Guide RNA
agaggauuucaagcggcaaagc

SEQ ID NO: 41576 - RNA, 22 nt, Artificial Sequence
  GATA2 Guide RNA
agaggccagaggacaggagucc

SEQ ID NO: 41577 - RNA, 22 nt, Artificial Sequence
  GATA2 Guide RNA
agagugggguggcgcaagggug

SEQ ID NO: 41578 - RNA, 22 nt, Artificial Sequence
  GATA2 Guide RNA
agauucuuucgggccagauuuc

SEQ ID NO: 41579 - RNA, 22 nt, Artificial Sequence
  GATA2 Guide RNA
agauuuccuccucggguauagg

SEQ ID NO: 41580 - RNA, 22 nt, Artificial Sequence
  GATA2 Guide RNA
agcacugggaugucaguugggg

SEQ ID NO: 41581 - RNA, 22 nt, Artificial Sequence
  GATA2 Guide RNA
agcagaggccagaggacaggag

SEQ ID NO: 41582 - RNA, 22 nt, Artificial Sequence
  GATA2 Guide RNA
agcagagugggguggcgcaagg

SEQ ID NO: 41583 - RNA, 22 nt, Artificial Sequence
  GATA2 Guide RNA
agcccaccgggcacccuugcgc

SEQ ID NO: 41584 - RNA, 22 nt, Artificial Sequence
  GATA2 Guide RNA
agcggcaaagcgucugcauuug

SEQ ID NO: 41585 - RNA, 22 nt, Artificial Sequence
  GATA2 Guide RNA
agcgucugcauuugaaggaguu

SEQ ID NO: 41586 - RNA, 22 nt, Artificial Sequence
  GATA2 Guide RNA
agcuaagcagaggccagaggac

SEQ ID NO: 41587 - RNA, 22 nt, Artificial Sequence
  GATA2 Guide RNA
agcucuuuuuuaaaaauagggc

SEQ ID NO: 41588 - RNA, 22 nt, Artificial Sequence
  GATA2 Guide RNA
agcuggcgguuaauuacagggg

SEQ ID NO: 41589 - RNA, 22 nt, Artificial Sequence
  GATA2 Guide RNA
aggaaaucuggcccgaaagaau

SEQ ID NO: 41590 - RNA, 22 nt, Artificial Sequence
  GATA2 Guide RNA
aggacaggaguccggcccgugg

SEQ ID NO: 41591 - RNA, 22 nt, Artificial Sequence
  GATA2 Guide RNA
aggagcuggcgguuaauuacag

SEQ ID NO: 41592 - RNA, 22 nt, Artificial Sequence
  GATA2 Guide RNA
aggaggaaaucuggcccgaaag

SEQ ID NO: 41593 - RNA, 22 nt, Artificial Sequence
  GATA2 Guide RNA
aggaguccggcccguggacacu

SEQ ID NO: 41594 - RNA, 22 nt, Artificial Sequence
  GATA2 Guide RNA
aggauuucaagcggcaaagcgu

SEQ ID NO: 41595 - RNA, 22 nt, Artificial Sequence
  GATA2 Guide RNA
aggccagaggacaggaguccgg

SEQ ID NO: 41596 - RNA, 22 nt, Artificial Sequence
  GATA2 Guide RNA
agggagcccaccgggcacccuu

SEQ ID NO: 41597 - RNA, 22 nt, Artificial Sequence
  GATA2 Guide RNA
agggugcccggugggcucccua

SEQ ID NO: 41598 - RNA, 22 nt, Artificial Sequence
  GATA2 Guide RNA
aguacuucauggcccuauuuuu

SEQ ID NO: 41599 - RNA, 22 nt, Artificial Sequence
  GATA2 Guide RNA
aguccggcccguggacacucaa

SEQ ID NO: 41600 - RNA, 22 nt, Artificial Sequence
  GATA2 Guide RNA
agugcuuuucaugauaaaagag

SEQ ID NO: 41601 - RNA, 22 nt, Artificial Sequence
  GATA2 Guide RNA
agugggguggcgcaagggugcc

SEQ ID NO: 41602 - RNA, 22 nt, Artificial Sequence
  GATA2 Guide RNA
aguguccacgggccggacuccu

SEQ ID NO: 41603 - RNA, 22 nt, Artificial Sequence
  GATA2 Guide RNA
aguugaguguccacgggccgga

SEQ ID NO: 41604 - RNA, 22 nt, Artificial Sequence
  GATA2 Guide RNA
aguuggggucgucucucuuucu

SEQ ID NO: 41605 - RNA, 22 nt, Artificial Sequence
  GATA2 Guide RNA
auaaaagaggauuucaagcggc

SEQ ID NO: 41606 - RNA, 22 nt, Artificial Sequence
  GATA2 Guide RNA
auacccgaggaggaaaucuggc

SEQ ID NO: 41607 - RNA, 22 nt, Artificial Sequence
  GATA2 Guide RNA
auagggagcccaccgggcaccc

SEQ ID NO: 41608 - RNA, 22 nt, Artificial Sequence
  GATA2 Guide RNA
aucaugaaaagcacugggaugu

SEQ ID NO: 41609 - RNA, 22 nt, Artificial Sequence
  GATA2 Guide RNA
aucccagugcuuuucaugauaa

SEQ ID NO: 41610 - RNA, 22 nt, Artificial Sequence
  GATA2 Guide RNA
auccccgaaguugaguguccac

SEQ ID NO: 41611 - RNA, 22 nt, Artificial Sequence
  GATA2 Guide RNA
aucccggagcagaguggggugg

SEQ ID NO: 41612 - RNA, 22 nt, Artificial Sequence
  GATA2 Guide RNA
auccucuuuuaucaugaaaagc

SEQ ID NO: 41613 - RNA, 22 nt, Artificial Sequence
  GATA2 Guide RNA
aucuggccagaaagagagacga

SEQ ID NO: 41614 - RNA, 22 nt, Artificial Sequence
  GATA2 Guide RNA
aucuggcccgaaagaaucuggc

SEQ ID NO: 41615 - RNA, 22 nt, Artificial Sequence
  GATA2 Guide RNA
augaaaagcacugggaugucag

SEQ ID NO: 41616 - RNA, 22 nt, Artificial Sequence
  GATA2 Guide RNA
augauaaaagaggauuucaagc

SEQ ID NO: 41617 - RNA, 22 nt, Artificial Sequence
  GATA2 Guide RNA
augcagacgcuuugccgcuuga

SEQ ID NO: 41618 - RNA, 22 nt, Artificial Sequence
  GATA2 Guide RNA
augucaguuggggucgucucuc

SEQ ID NO: 41619 - RNA, 22 nt, Artificial Sequence
  GATA2 Guide RNA
auuaaccgccagcuccugccca

SEQ ID NO: 41620 - RNA, 22 nt, Artificial Sequence
  GATA2 Guide RNA
auucuuucgggccagauuuccu

SEQ ID NO: 41621 - RNA, 22 nt, Artificial Sequence
  GATA2 Guide RNA
auuucaagcggcaaagcgucug

SEQ ID NO: 41622 - RNA, 22 nt, Artificial Sequence
  GATA2 Guide RNA
auuuccuccucggguauaggga

SEQ ID NO: 41623 - RNA, 22 nt, Artificial Sequence
  GATA2 Guide RNA
caaagcgucugcauuugaagga

SEQ ID NO: 41624 - RNA, 22 nt, Artificial Sequence
  GATA2 Guide RNA
caaaugcagacgcuuugccgcu

SEQ ID NO: 41625 - RNA, 22 nt, Artificial Sequence
  GATA2 Guide RNA
caacugacaucccagugcuuuu

SEQ ID NO: 41626 - RNA, 22 nt, Artificial Sequence
  GATA2 Guide RNA
caacuucggggaucccggagca

SEQ ID NO: 41627 - RNA, 22 nt, Artificial Sequence
  GATA2 Guide RNA
caagcggcaaagcgucugcauu

SEQ ID NO: 41628 - RNA, 22 nt, Artificial Sequence
  GATA2 Guide RNA
caagggugcccggugggcuccc

SEQ ID NO: 41629 - RNA, 22 nt, Artificial Sequence
  GATA2 Guide RNA
caccccacucugcuccgggauc

SEQ ID NO: 41630 - RNA, 22 nt, Artificial Sequence
  GATA2 Guide RNA
cacccuugcgccaccccacucu

SEQ ID NO: 41631 - RNA, 22 nt, Artificial Sequence
  GATA2 Guide RNA
caccgggcacccuugcgccacc

SEQ ID NO: 41632 - RNA, 22 nt, Artificial Sequence
  GATA2 Guide RNA
cacgggccggacuccuguccuc

SEQ ID NO: 41633 - RNA, 22 nt, Artificial Sequence
  GATA2 Guide RNA
cacucaacuucggggaucccgg

SEQ ID NO: 41634 - RNA, 22 nt, Artificial Sequence
  GATA2 Guide RNA
cacucugcuccgggauccccga

SEQ ID NO: 41635 - RNA, 22 nt, Artificial Sequence
  GATA2 Guide RNA
cacugggaugucaguugggguc

SEQ ID NO: 41636 - RNA, 22 nt, Artificial Sequence
  GATA2 Guide RNA
cagaaagagagacgaccccaac

SEQ ID NO: 41637 - RNA, 22 nt, Artificial Sequence
  GATA2 Guide RNA
cagacgcuuugccgcuugaaau

SEQ ID NO: 41638 - RNA, 22 nt, Artificial Sequence
  GATA2 Guide RNA
cagaggacaggaguccggcccg

SEQ ID NO: 41639 - RNA, 22 nt, Artificial Sequence
  GATA2 Guide RNA
cagaggccagaggacaggaguc

SEQ ID NO: 41640 - RNA, 22 nt, Artificial Sequence
  GATA2 Guide RNA
cagagugggguggcgcaagggu

SEQ ID NO: 41641 - RNA, 22 nt, Artificial Sequence
  GATA2 Guide RNA
cagauucuuucgggccagauuu

SEQ ID NO: 41642 - RNA, 22 nt, Artificial Sequence
  GATA2 Guide RNA
cagauuuccuccucggguauag

SEQ ID NO: 41643 - RNA, 22 nt, Artificial Sequence
  GATA2 Guide RNA
caggagcuggcgguuaauuaca

SEQ ID NO: 41644 - RNA, 22 nt, Artificial Sequence
  GATA2 Guide RNA
caggaguccggcccguggacac

SEQ ID NO: 41645 - RNA, 22 nt, Artificial Sequence
  GATA2 Guide RNA
cagugcuuuucaugauaaaaga

SEQ ID NO: 41646 - RNA, 22 nt, Artificial Sequence
  GATA2 Guide RNA
caguuggggucgucucucuuuc

SEQ ID NO: 41647 - RNA, 22 nt, Artificial Sequence
  GATA2 Guide RNA
caucccagugcuuuucaugaua

SEQ ID NO: 41648 - RNA, 22 nt, Artificial Sequence
  GATA2 Guide RNA
caugaaaagcacugggauguca

SEQ ID NO: 41649 - RNA, 22 nt, Artificial Sequence
  GATA2 Guide RNA
caugauaaaagaggauuucaag

SEQ ID NO: 41650 - RNA, 22 nt, Artificial Sequence
  GATA2 Guide RNA
cauggcccuauuuuuaaaaaag

SEQ ID NO: 41651 - RNA, 22 nt, Artificial Sequence
  GATA2 Guide RNA
ccaacugacaucccagugcuuu

SEQ ID NO: 41652 - RNA, 22 nt, Artificial Sequence
  GATA2 Guide RNA
ccaccccacucugcuccgggau

SEQ ID NO: 41653 - RNA, 22 nt, Artificial Sequence
  GATA2 Guide RNA
ccaccgggcacccuugcgccac

SEQ ID NO: 41654 - RNA, 22 nt, Artificial Sequence
  GATA2 Guide RNA
ccacgggccggacuccuguccu

SEQ ID NO: 41655 - RNA, 22 nt, Artificial Sequence
  GATA2 Guide RNA
ccacucugcuccgggauccccg

SEQ ID NO: 41656 - RNA, 22 nt, Artificial Sequence
  GATA2 Guide RNA
ccagaaagagagacgaccccaa

SEQ ID NO: 41657 - RNA, 22 nt, Artificial Sequence
  GATA2 Guide RNA
ccagaggacaggaguccggccc

SEQ ID NO: 41658 - RNA, 22 nt, Artificial Sequence
  GATA2 Guide RNA
ccagauucuuucgggccagauu

SEQ ID NO: 41659 - RNA, 22 nt, Artificial Sequence
  GATA2 Guide RNA
ccagauuuccuccucggguaua

SEQ ID NO: 41660 - RNA, 22 nt, Artificial Sequence
  GATA2 Guide RNA
ccagugcuuuucaugauaaaag

SEQ ID NO: 41661 - RNA, 22 nt, Artificial Sequence
  GATA2 Guide RNA
cccaacugacaucccagugcuu

SEQ ID NO: 41662 - RNA, 22 nt, Artificial Sequence
  GATA2 Guide RNA
cccaccgggcacccuugcgcca

SEQ ID NO: 41663 - RNA, 22 nt, Artificial Sequence
  GATA2 Guide RNA
cccacucugcuccgggaucccc

SEQ ID NO: 41664 - RNA, 22 nt, Artificial Sequence
  GATA2 Guide RNA
cccagugcuuuucaugauaaaa

SEQ ID NO: 41665 - RNA, 22 nt, Artificial Sequence
  GATA2 Guide RNA
ccccaacugacaucccagugcu

SEQ ID NO: 41666 - RNA, 22 nt, Artificial Sequence
  GATA2 Guide RNA
ccccacucugcuccgggauccc

SEQ ID NO: 41667 - RNA, 22 nt, Artificial Sequence
  GATA2 Guide RNA
ccccgaaguugaguguccacgg

SEQ ID NO: 41668 - RNA, 22 nt, Artificial Sequence
  GATA2 Guide RNA
ccccuguaauuaaccgccagcu

SEQ ID NO: 41669 - RNA, 22 nt, Artificial Sequence
  GATA2 Guide RNA
cccgaaagaaucuggccagaaa

SEQ ID NO: 41670 - RNA, 22 nt, Artificial Sequence
  GATA2 Guide RNA
cccgaaguugaguguccacggg

SEQ ID NO: 41671 - RNA, 22 nt, Artificial Sequence
  GATA2 Guide RNA
cccgaggaggaaaucuggcccg

SEQ ID NO: 41672 - RNA, 22 nt, Artificial Sequence
  GATA2 Guide RNA
cccggagcagagugggguggcg

SEQ ID NO: 41673 - RNA, 22 nt, Artificial Sequence
  GATA2 Guide RNA
cccggugggcucccuauacccg

SEQ ID NO: 41674 - RNA, 22 nt, Artificial Sequence
  GATA2 Guide RNA
cccguggacacucaacuucggg

SEQ ID NO: 41675 - RNA, 22 nt, Artificial Sequence
  GATA2 Guide RNA
cccuauacccgaggaggaaauc

SEQ ID NO: 41676 - RNA, 22 nt, Artificial Sequence
  GATA2 Guide RNA
cccuguaauuaaccgccagcuc

SEQ ID NO: 41677 - RNA, 22 nt, Artificial Sequence
  GATA2 Guide RNA
cccuugcgccaccccacucugc

SEQ ID NO: 41678 - RNA, 22 nt, Artificial Sequence
  GATA2 Guide RNA
ccgaaagaaucuggccagaaag

SEQ ID NO: 41679 - RNA, 22 nt, Artificial Sequence
  GATA2 Guide RNA
ccgaaguugaguguccacgggc

SEQ ID NO: 41680 - RNA, 22 nt, Artificial Sequence
  GATA2 Guide RNA
ccgaggaggaaaucuggcccga

SEQ ID NO: 41681 - RNA, 22 nt, Artificial Sequence
  GATA2 Guide RNA
ccgccagcuccugcccagcagc

SEQ ID NO: 41682 - RNA, 22 nt, Artificial Sequence
  GATA2 Guide RNA
ccgcuugaaauccucuuuuauc

SEQ ID NO: 41683 - RNA, 22 nt, Artificial Sequence
  GATA2 Guide RNA
ccggacuccuguccucuggccu

SEQ ID NO: 41684 - RNA, 22 nt, Artificial Sequence
  GATA2 Guide RNA
ccggagcagagugggguggcgc

SEQ ID NO: 41685 - RNA, 22 nt, Artificial Sequence
  GATA2 Guide RNA
ccggcccguggacacucaacuu

SEQ ID NO: 41686 - RNA, 22 nt, Artificial Sequence
  GATA2 Guide RNA
ccgggauccccgaaguugagug

SEQ ID NO: 41687 - RNA, 22 nt, Artificial Sequence
  GATA2 Guide RNA
ccggugggcucccuauacccga

SEQ ID NO: 41688 - RNA, 22 nt, Artificial Sequence
  GATA2 Guide RNA
ccguggacacucaacuucgggg

SEQ ID NO: 41689 - RNA, 22 nt, Artificial Sequence
  GATA2 Guide RNA
ccuauacccgaggaggaaaucu

SEQ ID NO: 41690 - RNA, 22 nt, Artificial Sequence
  GATA2 Guide RNA
ccuccucggguauagggagccc

SEQ ID NO: 41691 - RNA, 22 nt, Artificial Sequence
  GATA2 Guide RNA
ccucggguauagggagcccacc

SEQ ID NO: 41692 - RNA, 22 nt, Artificial Sequence
  GATA2 Guide RNA
ccucugcuuagcucuuuuuuaa

SEQ ID NO: 41693 - RNA, 22 nt, Artificial Sequence
  GATA2 Guide RNA
ccucuggccucugcuuagcucu

SEQ ID NO: 41694 - RNA, 22 nt, Artificial Sequence
  GATA2 Guide RNA
ccucuuuuaucaugaaaagcac

SEQ ID NO: 41695 - RNA, 22 nt, Artificial Sequence
  GATA2 Guide RNA
ccuguaauuaaccgccagcucc

SEQ ID NO: 41696 - RNA, 22 nt, Artificial Sequence
  GATA2 Guide RNA
ccuguccucuggccucugcuua

SEQ ID NO: 41697 - RNA, 22 nt, Artificial Sequence
  GATA2 Guide RNA
ccuucaaaugcagacgcuuugc

SEQ ID NO: 41698 - RNA, 22 nt, Artificial Sequence
  GATA2 Guide RNA
ccuugcgccaccccacucugcu

SEQ ID NO: 41699 - RNA, 22 nt, Artificial Sequence
  GATA2 Guide RNA
cgaaagaaucuggccagaaaga

SEQ ID NO: 41700 - RNA, 22 nt, Artificial Sequence
  GATA2 Guide RNA
cgaaguugaguguccacgggcc

SEQ ID NO: 41701 - RNA, 22 nt, Artificial Sequence
  GATA2 Guide RNA
cgaccccaacugacaucccagu

SEQ ID NO: 41702 - RNA, 22 nt, Artificial Sequence
  GATA2 Guide RNA
cgaggaggaaaucuggcccgaa

SEQ ID NO: 41703 - RNA, 22 nt, Artificial Sequence
  GATA2 Guide RNA
cgcaagggugcccggugggcuc

SEQ ID NO: 41704 - RNA, 22 nt, Artificial Sequence
  GATA2 Guide RNA
cgccaccccacucugcuccggg

SEQ ID NO: 41705 - RNA, 22 nt, Artificial Sequence
  GATA2 Guide RNA
cgcuugaaauccucuuuuauca

SEQ ID NO: 41706 - RNA, 22 nt, Artificial Sequence
  GATA2 Guide RNA
cgcuuugccgcuugaaauccuc

SEQ ID NO: 41707 - RNA, 22 nt, Artificial Sequence
  GATA2 Guide RNA
cggacuccuguccucuggccuc

SEQ ID NO: 41708 - RNA, 22 nt, Artificial Sequence
  GATA2 Guide RNA
cggagcagagugggguggcgca

SEQ ID NO: 41709 - RNA, 22 nt, Artificial Sequence
  GATA2 Guide RNA
cggcaaagcgucugcauuugaa

SEQ ID NO: 41710 - RNA, 22 nt, Artificial Sequence
  GATA2 Guide RNA
cggcccguggacacucaacuuc

SEQ ID NO: 41711 - RNA, 22 nt, Artificial Sequence
  GATA2 Guide RNA
cgggauccccgaaguugagugu

SEQ ID NO: 41712 - RNA, 22 nt, Artificial Sequence
  GATA2 Guide RNA
cgggcacccuugcgccacccca

SEQ ID NO: 41713 - RNA, 22 nt, Artificial Sequence
  GATA2 Guide RNA
cgggccagauuuccuccucggg

SEQ ID NO: 41714 - RNA, 22 nt, Artificial Sequence
  GATA2 Guide RNA
cgggccggacuccuguccucug

SEQ ID NO: 41715 - RNA, 22 nt, Artificial Sequence
  GATA2 Guide RNA
cggggaucccggagcagagugg

SEQ ID NO: 41716 - RNA, 22 nt, Artificial Sequence
  GATA2 Guide RNA
cggguauagggagcccaccggg

SEQ ID NO: 41717 - RNA, 22 nt, Artificial Sequence
  GATA2 Guide RNA
cggugggcucccuauacccgag

SEQ ID NO: 41718 - RNA, 22 nt, Artificial Sequence
  GATA2 Guide RNA
cgguuaauuacaggggaaaaaa

SEQ ID NO: 41719 - RNA, 22 nt, Artificial Sequence
  GATA2 Guide RNA
cgucucucuuucuggccagauu

SEQ ID NO: 41720 - RNA, 22 nt, Artificial Sequence
  GATA2 Guide RNA
cgucugcauuugaaggaguuuu

SEQ ID NO: 41721 - RNA, 22 nt, Artificial Sequence
  GATA2 Guide RNA
cguggacacucaacuucgggga

SEQ ID NO: 41722 - RNA, 22 nt, Artificial Sequence
  GATA2 Guide RNA
cuaagcagaggccagaggacag

SEQ ID NO: 41723 - RNA, 22 nt, Artificial Sequence
  GATA2 Guide RNA
cuauacccgaggaggaaaucug

SEQ ID NO: 41724 - RNA, 22 nt, Artificial Sequence
  GATA2 Guide RNA
cucaacuucggggaucccggag

SEQ ID NO: 41725 - RNA, 22 nt, Artificial Sequence
  GATA2 Guide RNA
cucccuauacccgaggaggaaa

SEQ ID NO: 41726 - RNA, 22 nt, Artificial Sequence
  GATA2 Guide RNA
cuccgggauccccgaaguugag

SEQ ID NO: 41727 - RNA, 22 nt, Artificial Sequence
  GATA2 Guide RNA
cuccucggguauagggagccca

SEQ ID NO: 41728 - RNA, 22 nt, Artificial Sequence
  GATA2 Guide RNA
cuccuguccucuggccucugcu

SEQ ID NO: 41729 - RNA, 22 nt, Artificial Sequence
  GATA2 Guide RNA
cuccuucaaaugcagacgcuuu

SEQ ID NO: 41730 - RNA, 22 nt, Artificial Sequence
  GATA2 Guide RNA
cucggguauagggagcccaccg

SEQ ID NO: 41731 - RNA, 22 nt, Artificial Sequence
  GATA2 Guide RNA
cucucuuucuggccagauucuu

SEQ ID NO: 41732 - RNA, 22 nt, Artificial Sequence
  GATA2 Guide RNA
cucugcuccgggauccccgaag

SEQ ID NO: 41733 - RNA, 22 nt, Artificial Sequence
  GATA2 Guide RNA
cucugcuuagcucuuuuuuaaa

SEQ ID NO: 41734 - RNA, 22 nt, Artificial Sequence
  GATA2 Guide RNA
cucuggccucugcuuagcucuu

SEQ ID NO: 41735 - RNA, 22 nt, Artificial Sequence
  GATA2 Guide RNA
cucuuucuggccagauucuuuc

SEQ ID NO: 41736 - RNA, 22 nt, Artificial Sequence
  GATA2 Guide RNA
cucuuuuaucaugaaaagcacu

SEQ ID NO: 41737 - RNA, 22 nt, Artificial Sequence
  GATA2 Guide RNA
cucuuuuuuaaaaauagggcca

SEQ ID NO: 41738 - RNA, 22 nt, Artificial Sequence
  GATA2 Guide RNA
cugacaucccagugcuuuucau

SEQ ID NO: 41739 - RNA, 22 nt, Artificial Sequence
  GATA2 Guide RNA
cugcuccgggauccccgaaguu

SEQ ID NO: 41740 - RNA, 22 nt, Artificial Sequence
  GATA2 Guide RNA
cugcugggcaggagcuggcggu

SEQ ID NO: 41741 - RNA, 22 nt, Artificial Sequence
  GATA2 Guide RNA
cuggccagaaagagagacgacc

SEQ ID NO: 41742 - RNA, 22 nt, Artificial Sequence
  GATA2 Guide RNA
cuggccagauucuuucgggcca

SEQ ID NO: 41743 - RNA, 22 nt, Artificial Sequence
  GATA2 Guide RNA
cuggcccgaaagaaucuggcca

SEQ ID NO: 41744 - RNA, 22 nt, Artificial Sequence
  GATA2 Guide RNA
cuggccucugcuuagcucuuuu

SEQ ID NO: 41745 - RNA, 22 nt, Artificial Sequence
  GATA2 Guide RNA
cuggcgguuaauuacaggggaa

SEQ ID NO: 41746 - RNA, 22 nt, Artificial Sequence
  GATA2 Guide RNA
cugggaugucaguuggggucgu

SEQ ID NO: 41747 - RNA, 22 nt, Artificial Sequence
  GATA2 Guide RNA
cugggcaggagcuggcgguuaa

SEQ ID NO: 41748 - RNA, 22 nt, Artificial Sequence
  GATA2 Guide RNA
cuguaauuaaccgccagcuccu

SEQ ID NO: 41749 - RNA, 22 nt, Artificial Sequence
  GATA2 Guide RNA
cuguccucuggccucugcuuag

SEQ ID NO: 41750 - RNA, 22 nt, Artificial Sequence
  GATA2 Guide RNA
cuucaaaugcagacgcuuugcc

SEQ ID NO: 41751 - RNA, 22 nt, Artificial Sequence
  GATA2 Guide RNA
cuucauggcccuauuuuuaaaa

SEQ ID NO: 41752 - RNA, 22 nt, Artificial Sequence
  GATA2 Guide RNA
cuucggggaucccggagcagag

SEQ ID NO: 41753 - RNA, 22 nt, Artificial Sequence
  GATA2 Guide RNA
cuugaaauccucuuuuaucaug

SEQ ID NO: 41754 - RNA, 22 nt, Artificial Sequence
  GATA2 Guide RNA
cuugcgccaccccacucugcuc

SEQ ID NO: 41755 - RNA, 22 nt, Artificial Sequence
  GATA2 Guide RNA
cuuucgggccagauuuccuccu

SEQ ID NO: 41756 - RNA, 22 nt, Artificial Sequence
  GATA2 Guide RNA
cuuucuggccagauucuuucgg

SEQ ID NO: 41757 - RNA, 22 nt, Artificial Sequence
  GATA2 Guide RNA
cuuugccgcuugaaauccucuu

SEQ ID NO: 41758 - RNA, 22 nt, Artificial Sequence
  GATA2 Guide RNA
cuuuuaucaugaaaagcacugg

SEQ ID NO: 41759 - RNA, 22 nt, Artificial Sequence
  GATA2 Guide RNA
cuuuuuuaaaaauagggccaug

SEQ ID NO: 41760 - RNA, 22 nt, Artificial Sequence
  GATA2 Guide RNA
gaaaagcacugggaugucaguu

SEQ ID NO: 41761 - RNA, 22 nt, Artificial Sequence
  GATA2 Guide RNA
gaaagaaucuggccagaaagag

SEQ ID NO: 41762 - RNA, 22 nt, Artificial Sequence
  GATA2 Guide RNA
gaaagagagacgaccccaacug

SEQ ID NO: 41763 - RNA, 22 nt, Artificial Sequence
  GATA2 Guide RNA
gaaaucuggcccgaaagaaucu

SEQ ID NO: 41764 - RNA, 22 nt, Artificial Sequence
  GATA2 Guide RNA
gaaguugaguguccacgggccg

SEQ ID NO: 41765 - RNA, 22 nt, Artificial Sequence
  GATA2 Guide RNA
gaaucuggccagaaagagagac

SEQ ID NO: 41766 - RNA, 22 nt, Artificial Sequence
  GATA2 Guide RNA
gacacucaacuucggggauccc

SEQ ID NO: 41767 - RNA, 22 nt, Artificial Sequence
  GATA2 Guide RNA
gacaggaguccggcccguggac

SEQ ID NO: 41768 - RNA, 22 nt, Artificial Sequence
  GATA2 Guide RNA
gacaucccagugcuuuucauga

SEQ ID NO: 41769 - RNA, 22 nt, Artificial Sequence
  GATA2 Guide RNA
gaccccaacugacaucccagug

SEQ ID NO: 41770 - RNA, 22 nt, Artificial Sequence
  GATA2 Guide RNA
gacgaccccaacugacauccca

SEQ ID NO: 41771 - RNA, 22 nt, Artificial Sequence
  GATA2 Guide RNA
gacgcuuugccgcuugaaaucc

SEQ ID NO: 41772 - RNA, 22 nt, Artificial Sequence
  GATA2 Guide RNA
gacuccuguccucuggccucug

SEQ ID NO: 41773 - RNA, 22 nt, Artificial Sequence
  GATA2 Guide RNA
gagacgaccccaacugacaucc

SEQ ID NO: 41774 - RNA, 22 nt, Artificial Sequence
  GATA2 Guide RNA
gagagacgaccccaacugacau

SEQ ID NO: 41775 - RNA, 22 nt, Artificial Sequence
  GATA2 Guide RNA
gagcagagugggguggcgcaag

SEQ ID NO: 41776 - RNA, 22 nt, Artificial Sequence
  GATA2 Guide RNA
gagcccaccgggcacccuugcg

SEQ ID NO: 41777 - RNA, 22 nt, Artificial Sequence
  GATA2 Guide RNA
gagcuaagcagaggccagagga

SEQ ID NO: 41778 - RNA, 22 nt, Artificial Sequence
  GATA2 Guide RNA
gagcuggcgguuaauuacaggg

SEQ ID NO: 41779 - RNA, 22 nt, Artificial Sequence
  GATA2 Guide RNA
gaggaaaucuggcccgaaagaa

SEQ ID NO: 41780 - RNA, 22 nt, Artificial Sequence
  GATA2 Guide RNA
gaggacaggaguccggcccgug

SEQ ID NO: 41781 - RNA, 22 nt, Artificial Sequence
  GATA2 Guide RNA
gaggaggaaaucuggcccgaaa

SEQ ID NO: 41782 - RNA, 22 nt, Artificial Sequence
  GATA2 Guide RNA
gaggauuucaagcggcaaagcg

SEQ ID NO: 41783 - RNA, 22 nt, Artificial Sequence
  GATA2 Guide RNA
gaggccagaggacaggaguccg

SEQ ID NO: 41784 - RNA, 22 nt, Artificial Sequence
  GATA2 Guide RNA
gaguccggcccguggacacuca

SEQ ID NO: 41785 - RNA, 22 nt, Artificial Sequence
  GATA2 Guide RNA
gagugggguggcgcaagggugc

SEQ ID NO: 41786 - RNA, 22 nt, Artificial Sequence
  GATA2 Guide RNA
gaguguccacgggccggacucc

SEQ ID NO: 41787 - RNA, 22 nt, Artificial Sequence
  GATA2 Guide RNA
gauaaaagaggauuucaagcgg

SEQ ID NO: 41788 - RNA, 22 nt, Artificial Sequence
  GATA2 Guide RNA
gauccccgaaguugagugucca

SEQ ID NO: 41789 - RNA, 22 nt, Artificial Sequence
  GATA2 Guide RNA
gaucccggagcagaguggggug

SEQ ID NO: 41790 - RNA, 22 nt, Artificial Sequence
  GATA2 Guide RNA
gaugucaguuggggucgucucu

SEQ ID NO: 41791 - RNA, 22 nt, Artificial Sequence
  GATA2 Guide RNA
gauucuuucgggccagauuucc

SEQ ID NO: 41792 - RNA, 22 nt, Artificial Sequence
  GATA2 Guide RNA
gauuucaagcggcaaagcgucu

SEQ ID NO: 41793 - RNA, 22 nt, Artificial Sequence
  GATA2 Guide RNA
gauuuccuccucggguauaggg

SEQ ID NO: 41794 - RNA, 22 nt, Artificial Sequence
  GATA2 Guide RNA
gcaaagcgucugcauuugaagg

SEQ ID NO: 41795 - RNA, 22 nt, Artificial Sequence
  GATA2 Guide RNA
gcaagggugcccggugggcucc

SEQ ID NO: 41796 - RNA, 22 nt, Artificial Sequence
  GATA2 Guide RNA
gcacccuugcgccaccccacuc

SEQ ID NO: 41797 - RNA, 22 nt, Artificial Sequence
  GATA2 Guide RNA
gcacugggaugucaguuggggu

SEQ ID NO: 41798 - RNA, 22 nt, Artificial Sequence
  GATA2 Guide RNA
gcagacgcuuugccgcuugaaa

SEQ ID NO: 41799 - RNA, 22 nt, Artificial Sequence
  GATA2 Guide RNA
gcagaggccagaggacaggagu

SEQ ID NO: 41800 - RNA, 22 nt, Artificial Sequence
  GATA2 Guide RNA
gcagagugggguggcgcaaggg

SEQ ID NO: 41801 - RNA, 22 nt, Artificial Sequence
  GATA2 Guide RNA
gcaggagcuggcgguuaauuac

SEQ ID NO: 41802 - RNA, 22 nt, Artificial Sequence
  GATA2 Guide RNA
gccaccccacucugcuccggga

SEQ ID NO: 41803 - RNA, 22 nt, Artificial Sequence
  GATA2 Guide RNA
gccagaaagagagacgacccca

SEQ ID NO: 41804 - RNA, 22 nt, Artificial Sequence
  GATA2 Guide RNA
gccagaggacaggaguccggcc

SEQ ID NO: 41805 - RNA, 22 nt, Artificial Sequence
  GATA2 Guide RNA
gccagauucuuucgggccagau

SEQ ID NO: 41806 - RNA, 22 nt, Artificial Sequence
  GATA2 Guide RNA
gccagauuuccuccucggguau

SEQ ID NO: 41807 - RNA, 22 nt, Artificial Sequence
  GATA2 Guide RNA
gcccgaaagaaucuggccagaa

SEQ ID NO: 41808 - RNA, 22 nt, Artificial Sequence
  GATA2 Guide RNA
gcccggugggcucccuauaccc

SEQ ID NO: 41809 - RNA, 22 nt, Artificial Sequence
  GATA2 Guide RNA
gcccguggacacucaacuucgg

SEQ ID NO: 41810 - RNA, 22 nt, Artificial Sequence
  GATA2 Guide RNA
gcccuauuuuuaaaaaagagcu

SEQ ID NO: 41811 - RNA, 22 nt, Artificial Sequence
  GATA2 Guide RNA
gccgcuugaaauccucuuuuau

SEQ ID NO: 41812 - RNA, 22 nt, Artificial Sequence
  GATA2 Guide RNA
gccggacuccuguccucuggcc

SEQ ID NO: 41813 - RNA, 22 nt, Artificial Sequence
  GATA2 Guide RNA
gccucugcuuagcucuuuuuua

SEQ ID NO: 41814 - RNA, 22 nt, Artificial Sequence
  GATA2 Guide RNA
gcgcaagggugcccggugggcu

SEQ ID NO: 41815 - RNA, 22 nt, Artificial Sequence
  GATA2 Guide RNA
gcgccaccccacucugcuccgg

SEQ ID NO: 41816 - RNA, 22 nt, Artificial Sequence
  GATA2 Guide RNA
gcggcaaagcgucugcauuuga

SEQ ID NO: 41817 - RNA, 22 nt, Artificial Sequence
  GATA2 Guide RNA
gcgguuaauuacaggggaaaaa

SEQ ID NO: 41818 - RNA, 22 nt, Artificial Sequence
  GATA2 Guide RNA
gcgucugcauuugaaggaguuu

SEQ ID NO: 41819 - RNA, 22 nt, Artificial Sequence
  GATA2 Guide RNA
gcuaagcagaggccagaggaca

SEQ ID NO: 41820 - RNA, 22 nt, Artificial Sequence
  GATA2 Guide RNA
gcucccuauacccgaggaggaa

SEQ ID NO: 41821 - RNA, 22 nt, Artificial Sequence
  GATA2 Guide RNA
gcuccgggauccccgaaguuga

SEQ ID NO: 41822 - RNA, 22 nt, Artificial Sequence
  GATA2 Guide RNA
gcucuuuuuuaaaaauagggcc

SEQ ID NO: 41823 - RNA, 22 nt, Artificial Sequence
  GATA2 Guide RNA
gcugcugggcaggagcuggcgg

SEQ ID NO: 41824 - RNA, 22 nt, Artificial Sequence
  GATA2 Guide RNA
gcuggcgguuaauuacagggga

SEQ ID NO: 41825 - RNA, 22 nt, Artificial Sequence
  GATA2 Guide RNA
gcugggcaggagcuggcgguua

SEQ ID NO: 41826 - RNA, 22 nt, Artificial Sequence
  GATA2 Guide RNA
gcuugaaauccucuuuuaucau

SEQ ID NO: 41827 - RNA, 22 nt, Artificial Sequence
  GATA2 Guide RNA
gcuuugccgcuugaaauccucu

SEQ ID NO: 41828 - RNA, 22 nt, Artificial Sequence
  GATA2 Guide RNA
gcuuuucaugauaaaagaggau

SEQ ID NO: 41829 - RNA, 22 nt, Artificial Sequence
  GATA2 Guide RNA
ggaaaucuggcccgaaagaauc

SEQ ID NO: 41830 - RNA, 22 nt, Artificial Sequence
  GATA2 Guide RNA
ggacacucaacuucggggaucc

SEQ ID NO: 41831 - RNA, 22 nt, Artificial Sequence
  GATA2 Guide RNA
ggacaggaguccggcccgugga

SEQ ID NO: 41832 - RNA, 22 nt, Artificial Sequence
  GATA2 Guide RNA
ggacuccuguccucuggccucu

SEQ ID NO: 41833 - RNA, 22 nt, Artificial Sequence
  GATA2 Guide RNA
ggagcagagugggguggcgcaa

SEQ ID NO: 41834 - RNA, 22 nt, Artificial Sequence
  GATA2 Guide RNA
ggagcccaccgggcacccuugc

SEQ ID NO: 41835 - RNA, 22 nt, Artificial Sequence
  GATA2 Guide RNA
ggagcuggcgguuaauuacagg

SEQ ID NO: 41836 - RNA, 22 nt, Artificial Sequence
  GATA2 Guide RNA
ggaggaaaucuggcccgaaaga

SEQ ID NO: 41837 - RNA, 22 nt, Artificial Sequence
  GATA2 Guide RNA
ggaguccggcccguggacacuc

SEQ ID NO: 41838 - RNA, 22 nt, Artificial Sequence
  GATA2 Guide RNA
ggauccccgaaguugagugucc

SEQ ID NO: 41839 - RNA, 22 nt, Artificial Sequence
  GATA2 Guide RNA
ggaucccggagcagaguggggu

SEQ ID NO: 41840 - RNA, 22 nt, Artificial Sequence
  GATA2 Guide RNA
ggaugucaguuggggucgucuc

SEQ ID NO: 41841 - RNA, 22 nt, Artificial Sequence
  GATA2 Guide RNA
ggauuucaagcggcaaagcguc

SEQ ID NO: 41842 - RNA, 22 nt, Artificial Sequence
  GATA2 Guide RNA
ggcaaagcgucugcauuugaag

SEQ ID NO: 41843 - RNA, 22 nt, Artificial Sequence
  GATA2 Guide RNA
ggcacccuugcgccaccccacu

SEQ ID NO: 41844 - RNA, 22 nt, Artificial Sequence
  GATA2 Guide RNA
ggcaggagcuggcgguuaauua

SEQ ID NO: 41845 - RNA, 22 nt, Artificial Sequence
  GATA2 Guide RNA
ggccagaaagagagacgacccc

SEQ ID NO: 41846 - RNA, 22 nt, Artificial Sequence
  GATA2 Guide RNA
ggccagaggacaggaguccggc

SEQ ID NO: 41847 - RNA, 22 nt, Artificial Sequence
  GATA2 Guide RNA
ggccagauucuuucgggccaga

SEQ ID NO: 41848 - RNA, 22 nt, Artificial Sequence
  GATA2 Guide RNA
ggccagauuuccuccucgggua

SEQ ID NO: 41849 - RNA, 22 nt, Artificial Sequence
  GATA2 Guide RNA
ggcccgaaagaaucuggccaga

SEQ ID NO: 41850 - RNA, 22 nt, Artificial Sequence
  GATA2 Guide RNA
ggcccguggacacucaacuucg

SEQ ID NO: 41851 - RNA, 22 nt, Artificial Sequence
  GATA2 Guide RNA
ggcccuauuuuuaaaaaagagc

SEQ ID NO: 41852 - RNA, 22 nt, Artificial Sequence
  GATA2 Guide RNA
ggccggacuccuguccucuggc

SEQ ID NO: 41853 - RNA, 22 nt, Artificial Sequence
  GATA2 Guide RNA
ggccucugcuuagcucuuuuuu

SEQ ID NO: 41854 - RNA, 22 nt, Artificial Sequence
  GATA2 Guide RNA
ggcgguuaauuacaggggaaaa

SEQ ID NO: 41855 - RNA, 22 nt, Artificial Sequence
  GATA2 Guide RNA
ggcucccuauacccgaggagga

SEQ ID NO: 41856 - RNA, 22 nt, Artificial Sequence
  GATA2 Guide RNA
ggcugcugggcaggagcuggcg

SEQ ID NO: 41857 - RNA, 22 nt, Artificial Sequence
  GATA2 Guide RNA
gggagcccaccgggcacccuug

SEQ ID NO: 41858 - RNA, 22 nt, Artificial Sequence
  GATA2 Guide RNA
gggauccccgaaguugaguguc

SEQ ID NO: 41859 - RNA, 22 nt, Artificial Sequence
  GATA2 Guide RNA
gggaucccggagcagagugggg

SEQ ID NO: 41860 - RNA, 22 nt, Artificial Sequence
  GATA2 Guide RNA
gggaugucaguuggggucgucu

SEQ ID NO: 41861 - RNA, 22 nt, Artificial Sequence
  GATA2 Guide RNA
gggcacccuugcgccaccccac

SEQ ID NO: 41862 - RNA, 22 nt, Artificial Sequence
  GATA2 Guide RNA
gggcaggagcuggcgguuaauu

SEQ ID NO: 41863 - RNA, 22 nt, Artificial Sequence
  GATA2 Guide RNA
gggccagauuuccuccucgggu

SEQ ID NO: 41864 - RNA, 22 nt, Artificial Sequence
  GATA2 Guide RNA
gggccggacuccuguccucugg

SEQ ID NO: 41865 - RNA, 22 nt, Artificial Sequence
  GATA2 Guide RNA
gggcucccuauacccgaggagg

SEQ ID NO: 41866 - RNA, 22 nt, Artificial Sequence
  GATA2 Guide RNA
gggcugcugggcaggagcuggc

SEQ ID NO: 41867 - RNA, 22 nt, Artificial Sequence
  GATA2 Guide RNA
ggggaucccggagcagaguggg

SEQ ID NO: 41868 - RNA, 22 nt, Artificial Sequence
  GATA2 Guide RNA
ggggcugcugggcaggagcugg

SEQ ID NO: 41869 - RNA, 22 nt, Artificial Sequence
  GATA2 Guide RNA
gggggcugcugggcaggagcug

SEQ ID NO: 41870 - RNA, 22 nt, Artificial Sequence
  GATA2 Guide RNA
ggggucgucucucuuucuggcc

SEQ ID NO: 41871 - RNA, 22 nt, Artificial Sequence
  GATA2 Guide RNA
ggguauagggagcccaccgggc

SEQ ID NO: 41872 - RNA, 22 nt, Artificial Sequence
  GATA2 Guide RNA
gggucgucucucuuucuggcca

SEQ ID NO: 41873 - RNA, 22 nt, Artificial Sequence
  GATA2 Guide RNA
gggugcccggugggcucccuau

SEQ ID NO: 41874 - RNA, 22 nt, Artificial Sequence
  GATA2 Guide RNA
ggguggcgcaagggugcccggu

SEQ ID NO: 41875 - RNA, 22 nt, Artificial Sequence
  GATA2 Guide RNA
gguauagggagcccaccgggca

SEQ ID NO: 41876 - RNA, 22 nt, Artificial Sequence
  GATA2 Guide RNA
ggucgucucucuuucuggccag

SEQ ID NO: 41877 - RNA, 22 nt, Artificial Sequence
  GATA2 Guide RNA
ggugcccggugggcucccuaua

SEQ ID NO: 41878 - RNA, 22 nt, Artificial Sequence
  GATA2 Guide RNA
gguggcgcaagggugcccggug

SEQ ID NO: 41879 - RNA, 22 nt, Artificial Sequence
  GATA2 Guide RNA
ggugggcucccuauacccgagg

SEQ ID NO: 41880 - RNA, 22 nt, Artificial Sequence
  GATA2 Guide RNA
guaauuaaccgccagcuccugc

SEQ ID NO: 41881 - RNA, 22 nt, Artificial Sequence
  GATA2 Guide RNA
guacuucauggcccuauuuuua

SEQ ID NO: 41882 - RNA, 22 nt, Artificial Sequence
  GATA2 Guide RNA
guauagggagcccaccgggcac

SEQ ID NO: 41883 - RNA, 22 nt, Artificial Sequence
  GATA2 Guide RNA
gucaguuggggucgucucucuu

SEQ ID NO: 41884 - RNA, 22 nt, Artificial Sequence
  GATA2 Guide RNA
guccacgggccggacuccuguc

SEQ ID NO: 41885 - RNA, 22 nt, Artificial Sequence
  GATA2 Guide RNA
guccggcccguggacacucaac

SEQ ID NO: 41886 - RNA, 22 nt, Artificial Sequence
  GATA2 Guide RNA
guccucuggccucugcuuagcu

SEQ ID NO: 41887 - RNA, 22 nt, Artificial Sequence
  GATA2 Guide RNA
gucgucucucuuucuggccaga

SEQ ID NO: 41888 - RNA, 22 nt, Artificial Sequence
  GATA2 Guide RNA
gucucucuuucuggccagauuc

SEQ ID NO: 41889 - RNA, 22 nt, Artificial Sequence
  GATA2 Guide RNA
gucugcauuugaaggaguuuuu

SEQ ID NO: 41890 - RNA, 22 nt, Artificial Sequence
  GATA2 Guide RNA
gugcccggugggcucccuauac

SEQ ID NO: 41891 - RNA, 22 nt, Artificial Sequence
  GATA2 Guide RNA
gugcuuuucaugauaaaagagg

SEQ ID NO: 41892 - RNA, 22 nt, Artificial Sequence
  GATA2 Guide RNA
guggacacucaacuucggggau

SEQ ID NO: 41893 - RNA, 22 nt, Artificial Sequence
  GATA2 Guide RNA
guggcgcaagggugcccggugg

SEQ ID NO: 41894 - RNA, 22 nt, Artificial Sequence
  GATA2 Guide RNA
gugggcucccuauacccgagga

SEQ ID NO: 41895 - RNA, 22 nt, Artificial Sequence
  GATA2 Guide RNA
gugggguggcgcaagggugccc

SEQ ID NO: 41896 - RNA, 22 nt, Artificial Sequence
  GATA2 Guide RNA
guguccacgggccggacuccug

SEQ ID NO: 41897 - RNA, 22 nt, Artificial Sequence
  GATA2 Guide RNA
guugaguguccacgggccggac

SEQ ID NO: 41898 - RNA, 22 nt, Artificial Sequence
  GATA2 Guide RNA
guuggggucgucucucuuucug

SEQ ID NO: 41899 - RNA, 22 nt, Artificial Sequence
  GATA2 Guide RNA
uaaaaaagagcuaagcagaggc

SEQ ID NO: 41900 - RNA, 22 nt, Artificial Sequence
  GATA2 Guide RNA
uaaaaauagggccaugaaguac

SEQ ID NO: 41901 - RNA, 22 nt, Artificial Sequence
  GATA2 Guide RNA
uaaaagaggauuucaagcggca

SEQ ID NO: 41902 - RNA, 22 nt, Artificial Sequence
  GATA2 Guide RNA
uaaccgccagcuccugcccagc

SEQ ID NO: 41903 - RNA, 22 nt, Artificial Sequence
  GATA2 Guide RNA
uaagcagaggccagaggacagg

SEQ ID NO: 41904 - RNA, 22 nt, Artificial Sequence
  GATA2 Guide RNA
uaauuaaccgccagcuccugcc

SEQ ID NO: 41905 - RNA, 22 nt, Artificial Sequence
  GATA2 Guide RNA
uacccgaggaggaaaucuggcc

SEQ ID NO: 41906 - RNA, 22 nt, Artificial Sequence
  GATA2 Guide RNA
uacuucauggcccuauuuuuaa

SEQ ID NO: 41907 - RNA, 22 nt, Artificial Sequence
  GATA2 Guide RNA
uagggagcccaccgggcacccu

SEQ ID NO: 41908 - RNA, 22 nt, Artificial Sequence
  GATA2 Guide RNA
uauacccgaggaggaaaucugg

SEQ ID NO: 41909 - RNA, 22 nt, Artificial Sequence
  GATA2 Guide RNA
uauagggagcccaccgggcacc

SEQ ID NO: 41910 - RNA, 22 nt, Artificial Sequence
  GATA2 Guide RNA
uaucaugaaaagcacugggaug

SEQ ID NO: 41911 - RNA, 22 nt, Artificial Sequence
  GATA2 Guide RNA
ucaaaugcagacgcuuugccgc

SEQ ID NO: 41912 - RNA, 22 nt, Artificial Sequence
  GATA2 Guide RNA
ucaacuucggggaucccggagc

SEQ ID NO: 41913 - RNA, 22 nt, Artificial Sequence
  GATA2 Guide RNA
ucaagcggcaaagcgucugcau

SEQ ID NO: 41914 - RNA, 22 nt, Artificial Sequence
  GATA2 Guide RNA
ucaguuggggucgucucucuuu

SEQ ID NO: 41915 - RNA, 22 nt, Artificial Sequence
  GATA2 Guide RNA
ucaugaaaagcacugggauguc

SEQ ID NO: 41916 - RNA, 22 nt, Artificial Sequence
  GATA2 Guide RNA
uccacgggccggacuccugucc

SEQ ID NO: 41917 - RNA, 22 nt, Artificial Sequence
  GATA2 Guide RNA
ucccagugcuuuucaugauaaa

SEQ ID NO: 41918 - RNA, 22 nt, Artificial Sequence
  GATA2 Guide RNA
uccccgaaguugaguguccacg

SEQ ID NO: 41919 - RNA, 22 nt, Artificial Sequence
  GATA2 Guide RNA
uccccuguaauuaaccgccagc

SEQ ID NO: 41920 - RNA, 22 nt, Artificial Sequence
  GATA2 Guide RNA
ucccggagcagagugggguggc

SEQ ID NO: 41921 - RNA, 22 nt, Artificial Sequence
  GATA2 Guide RNA
ucccuauacccgaggaggaaau

SEQ ID NO: 41922 - RNA, 22 nt, Artificial Sequence
  GATA2 Guide RNA
uccggcccguggacacucaacu

SEQ ID NO: 41923 - RNA, 22 nt, Artificial Sequence
  GATA2 Guide RNA
uccgggauccccgaaguugagu

SEQ ID NO: 41924 - RNA, 22 nt, Artificial Sequence
  GATA2 Guide RNA
uccuccucggguauagggagcc

SEQ ID NO: 41925 - RNA, 22 nt, Artificial Sequence
  GATA2 Guide RNA
uccucggguauagggagcccac

SEQ ID NO: 41926 - RNA, 22 nt, Artificial Sequence
  GATA2 Guide RNA
uccucuggccucugcuuagcuc

SEQ ID NO: 41927 - RNA, 22 nt, Artificial Sequence
  GATA2 Guide RNA
uccucuuuuaucaugaaaagca

SEQ ID NO: 41928 - RNA, 22 nt, Artificial Sequence
  GATA2 Guide RNA
uccuguccucuggccucugcuu

SEQ ID NO: 41929 - RNA, 22 nt, Artificial Sequence
  GATA2 Guide RNA
uccuucaaaugcagacgcuuug

SEQ ID NO: 41930 - RNA, 22 nt, Artificial Sequence
  GATA2 Guide RNA
ucgggccagauuuccuccucgg

SEQ ID NO: 41931 - RNA, 22 nt, Artificial Sequence
  GATA2 Guide RNA
ucggggaucccggagcagagug

SEQ ID NO: 41932 - RNA, 22 nt, Artificial Sequence
  GATA2 Guide RNA
ucggguauagggagcccaccgg

SEQ ID NO: 41933 - RNA, 22 nt, Artificial Sequence
  GATA2 Guide RNA
ucgucucucuuucuggccagau

SEQ ID NO: 41934 - RNA, 22 nt, Artificial Sequence
  GATA2 Guide RNA
ucucucuuucuggccagauucu

SEQ ID NO: 41935 - RNA, 22 nt, Artificial Sequence
  GATA2 Guide RNA
ucucuuucuggccagauucuuu

SEQ ID NO: 41936 - RNA, 22 nt, Artificial Sequence
  GATA2 Guide RNA
ucugcauuugaaggaguuuuuu

SEQ ID NO: 41937 - RNA, 22 nt, Artificial Sequence
  GATA2 Guide RNA
ucugcuccgggauccccgaagu

SEQ ID NO: 41938 - RNA, 22 nt, Artificial Sequence
  GATA2 Guide RNA
ucuggccagaaagagagacgac

SEQ ID NO: 41939 - RNA, 22 nt, Artificial Sequence
  GATA2 Guide RNA
ucuggccagauucuuucgggcc

SEQ ID NO: 41940 - RNA, 22 nt, Artificial Sequence
  GATA2 Guide RNA
ucuggcccgaaagaaucuggcc

SEQ ID NO: 41941 - RNA, 22 nt, Artificial Sequence
  GATA2 Guide RNA
ucuggccucugcuuagcucuuu

SEQ ID NO: 41942 - RNA, 22 nt, Artificial Sequence
  GATA2 Guide RNA
ucuuucgggccagauuuccucc

SEQ ID NO: 41943 - RNA, 22 nt, Artificial Sequence
  GATA2 Guide RNA
ucuuucuggccagauucuuucg

SEQ ID NO: 41944 - RNA, 22 nt, Artificial Sequence
  GATA2 Guide RNA
ucuuuuaucaugaaaagcacug

SEQ ID NO: 41945 - RNA, 22 nt, Artificial Sequence
  GATA2 Guide RNA
ugaaaagcacugggaugucagu

SEQ ID NO: 41946 - RNA, 22 nt, Artificial Sequence
  GATA2 Guide RNA
ugacaucccagugcuuuucaug

SEQ ID NO: 41947 - RNA, 22 nt, Artificial Sequence
  GATA2 Guide RNA
ugaguguccacgggccggacuc

SEQ ID NO: 41948 - RNA, 22 nt, Artificial Sequence
  GATA2 Guide RNA
ugauaaaagaggauuucaagcg

SEQ ID NO: 41949 - RNA, 22 nt, Artificial Sequence
  GATA2 Guide RNA
ugcagacgcuuugccgcuugaa

SEQ ID NO: 41950 - RNA, 22 nt, Artificial Sequence
  GATA2 Guide RNA
ugcccggugggcucccuauacc

SEQ ID NO: 41951 - RNA, 22 nt, Artificial Sequence
  GATA2 Guide RNA
ugccgcuugaaauccucuuuua

SEQ ID NO: 41952 - RNA, 22 nt, Artificial Sequence
  GATA2 Guide RNA
ugcgccaccccacucugcuccg

SEQ ID NO: 41953 - RNA, 22 nt, Artificial Sequence
  GATA2 Guide RNA
ugcuccgggauccccgaaguug

SEQ ID NO: 41954 - RNA, 22 nt, Artificial Sequence
  GATA2 Guide RNA
ugcugggcaggagcuggcgguu

SEQ ID NO: 41955 - RNA, 22 nt, Artificial Sequence
  GATA2 Guide RNA
ugcuuuucaugauaaaagagga

SEQ ID NO: 41956 - RNA, 22 nt, Artificial Sequence
  GATA2 Guide RNA
uggacacucaacuucggggauc

SEQ ID NO: 41957 - RNA, 22 nt, Artificial Sequence
  GATA2 Guide RNA
uggccagaaagagagacgaccc

SEQ ID NO: 41958 - RNA, 22 nt, Artificial Sequence
  GATA2 Guide RNA
uggccagauucuuucgggccag

SEQ ID NO: 41959 - RNA, 22 nt, Artificial Sequence
  GATA2 Guide RNA
uggcccgaaagaaucuggccag

SEQ ID NO: 41960 - RNA, 22 nt, Artificial Sequence
  GATA2 Guide RNA
uggcccuauuuuuaaaaaagag

SEQ ID NO: 41961 - RNA, 22 nt, Artificial Sequence
  GATA2 Guide RNA
uggccucugcuuagcucuuuuu

SEQ ID NO: 41962 - RNA, 22 nt, Artificial Sequence
  GATA2 Guide RNA
uggcgcaagggugcccgguggg

SEQ ID NO: 41963 - RNA, 22 nt, Artificial Sequence
  GATA2 Guide RNA
uggcgguuaauuacaggggaaa

SEQ ID NO: 41964 - RNA, 22 nt, Artificial Sequence
  GATA2 Guide RNA
ugggaugucaguuggggucguc

SEQ ID NO: 41965 - RNA, 22 nt, Artificial Sequence
  GATA2 Guide RNA
ugggcaggagcuggcgguuaau

SEQ ID NO: 41966 - RNA, 22 nt, Artificial Sequence
  GATA2 Guide RNA
ugggcucccuauacccgaggag

SEQ ID NO: 41967 - RNA, 22 nt, Artificial Sequence
  GATA2 Guide RNA
uggggucgucucucuuucuggc

SEQ ID NO: 41968 - RNA, 22 nt, Artificial Sequence
  GATA2 Guide RNA
ugggguggcgcaagggugcccg

SEQ ID NO: 41969 - RNA, 22 nt, Artificial Sequence
  GATA2 Guide RNA
uguaauuaaccgccagcuccug

SEQ ID NO: 41970 - RNA, 22 nt, Artificial Sequence
  GATA2 Guide RNA
ugucaguuggggucgucucucu

SEQ ID NO: 41971 - RNA, 22 nt, Artificial Sequence
  GATA2 Guide RNA
uguccacgggccggacuccugu

SEQ ID NO: 41972 - RNA, 22 nt, Artificial Sequence
  GATA2 Guide RNA
uguccucuggccucugcuuagc

SEQ ID NO: 41973 - RNA, 22 nt, Artificial Sequence
  GATA2 Guide RNA
uuaaaaaagagcuaagcagagg

SEQ ID NO: 41974 - RNA, 22 nt, Artificial Sequence
  GATA2 Guide RNA
uuaaaaauagggccaugaagua

SEQ ID NO: 41975 - RNA, 22 nt, Artificial Sequence
  GATA2 Guide RNA
uuaaccgccagcuccugcccag

SEQ ID NO: 41976 - RNA, 22 nt, Artificial Sequence
  GATA2 Guide RNA
uuaucaugaaaagcacugggau

SEQ ID NO: 41977 - RNA, 22 nt, Artificial Sequence
  GATA2 Guide RNA
uucaaaugcagacgcuuugccg

SEQ ID NO: 41978 - RNA, 22 nt, Artificial Sequence
  GATA2 Guide RNA
uucaagcggcaaagcgucugca

SEQ ID NO: 41979 - RNA, 22 nt, Artificial Sequence
  GATA2 Guide RNA
uuccccuguaauuaaccgccag

SEQ ID NO: 41980 - RNA, 22 nt, Artificial Sequence
  GATA2 Guide RNA
uuccuccucggguauagggagc

SEQ ID NO: 41981 - RNA, 22 nt, Artificial Sequence
  GATA2 Guide RNA
uucgggccagauuuccuccucg

SEQ ID NO: 41982 - RNA, 22 nt, Artificial Sequence
  GATA2 Guide RNA
uucggggaucccggagcagagu

SEQ ID NO: 41983 - RNA, 22 nt, Artificial Sequence
  GATA2 Guide RNA
uucuggccagauucuuucgggc

SEQ ID NO: 41984 - RNA, 22 nt, Artificial Sequence
  GATA2 Guide RNA
uucuuucgggccagauuuccuc

SEQ ID NO: 41985 - RNA, 22 nt, Artificial Sequence
  GATA2 Guide RNA
uugaguguccacgggccggacu

SEQ ID NO: 41986 - RNA, 22 nt, Artificial Sequence
  GATA2 Guide RNA
uugccgcuugaaauccucuuuu

SEQ ID NO: 41987 - RNA, 22 nt, Artificial Sequence
  GATA2 Guide RNA
uugcgccaccccacucugcucc

SEQ ID NO: 41988 - RNA, 22 nt, Artificial Sequence
  GATA2 Guide RNA
uuggggucgucucucuuucugg

SEQ ID NO: 41989 - RNA, 22 nt, Artificial Sequence
  GATA2 Guide RNA
uuuaaaaaagagcuaagcagag

SEQ ID NO: 41990 - RNA, 22 nt, Artificial Sequence
  GATA2 Guide RNA
uuuaaaaauagggccaugaagu

SEQ ID NO: 41991 - RNA, 22 nt, Artificial Sequence
  GATA2 Guide RNA
uuuaucaugaaaagcacuggga

SEQ ID NO: 41992 - RNA, 22 nt, Artificial Sequence
  GATA2 Guide RNA
uuucaagcggcaaagcgucugc

SEQ ID NO: 41993 - RNA, 22 nt, Artificial Sequence
  GATA2 Guide RNA
uuuccccuguaauuaaccgcca

SEQ ID NO: 41994 - RNA, 22 nt, Artificial Sequence
  GATA2 Guide RNA
uuuccuccucggguauagggag

SEQ ID NO: 41995 - RNA, 22 nt, Artificial Sequence
  GATA2 Guide RNA
uuucgggccagauuuccuccuc

SEQ ID NO: 41996 - RNA, 22 nt, Artificial Sequence
  GATA2 Guide RNA
uuucuggccagauucuuucggg

SEQ ID NO: 41997 - RNA, 22 nt, Artificial Sequence
  GATA2 Guide RNA
uuugccgcuugaaauccucuuu

SEQ ID NO: 41998 - RNA, 22 nt, Artificial Sequence
  GATA2 Guide RNA
uuuuaaaaauagggccaugaag

SEQ ID NO: 41999 - RNA, 22 nt, Artificial Sequence
  GATA2 Guide RNA
uuuuaucaugaaaagcacuggg

SEQ ID NO: 42000 - RNA, 22 nt, Artificial Sequence
  GATA2 Guide RNA
uuuuccccuguaauuaaccgcc

SEQ ID NO: 42001 - RNA, 22 nt, Artificial Sequence
  GATA2 Guide RNA
uuuuuccccuguaauuaaccgc

SEQ ID NO: 42002 - RNA, 22 nt, Artificial Sequence
  GATA2 Guide RNA
uuuuuuccccuguaauuaaccg

SEQ ID NO: 42003 - RNA, 20 nt, Artificial Sequence
  GATA2 Guide RNA
aaaaagggucaggguggggg

SEQ ID NO: 42004 - RNA, 20 nt, Artificial Sequence
  GATA2 Guide RNA
aaaagggucagggugggggg

SEQ ID NO: 42005 - RNA, 20 nt, Artificial Sequence
  GATA2 Guide RNA
aacauuccucccaccccgcc

SEQ ID NO: 42006 - RNA, 20 nt, Artificial Sequence
  GATA2 Guide RNA
aaccaccaguuuucagaggg

SEQ ID NO: 42007 - RNA, 20 nt, Artificial Sequence
  GATA2 Guide RNA
aacccgcccuuccuggaaug

SEQ ID NO: 42008 - RNA, 20 nt, Artificial Sequence
  GATA2 Guide RNA
aaccuagaggcaaccaccag

SEQ ID NO: 42009 - RNA, 20 nt, Artificial Sequence
  GATA2 Guide RNA
aacuggcccucugaaaacug

SEQ ID NO: 42010 - RNA, 20 nt, Artificial Sequence
  GATA2 Guide RNA
aagcagagaaaccacuuccc

SEQ ID NO: 42011 - RNA, 20 nt, Artificial Sequence
  GATA2 Guide RNA
aagccaggaauugugcccga

SEQ ID NO: 42012 - RNA, 20 nt, Artificial Sequence
  GATA2 Guide RNA
aagcugagggucccaggaag

SEQ ID NO: 42013 - RNA, 20 nt, Artificial Sequence
  GATA2 Guide RNA
aaggaacuggcccucugaaa

SEQ ID NO: 42014 - RNA, 20 nt, Artificial Sequence
  GATA2 Guide RNA
aagggcggguucuggcauau

SEQ ID NO: 42015 - RNA, 20 nt, Artificial Sequence
  GATA2 Guide RNA
aaggucgggcacaauuccug

SEQ ID NO: 42016 - RNA, 20 nt, Artificial Sequence
  GATA2 Guide RNA
aagugguuucucugcuuaaa

SEQ ID NO: 42017 - RNA, 20 nt, Artificial Sequence
  GATA2 Guide RNA
aaugguagccaucuggugau

SEQ ID NO: 42018 - RNA, 20 nt, Artificial Sequence
  GATA2 Guide RNA
aauguugcuggaggaaggaa

SEQ ID NO: 42019 - RNA, 20 nt, Artificial Sequence
  GATA2 Guide RNA
aauuccuggcuuccugggac

SEQ ID NO: 42020 - RNA, 20 nt, Artificial Sequence
  GATA2 Guide RNA
aauugugcccgaccuucaua

SEQ ID NO: 42021 - RNA, 20 nt, Artificial Sequence
  GATA2 Guide RNA
acaauuccuggcuuccuggg

SEQ ID NO: 42022 - RNA, 20 nt, Artificial Sequence
  GATA2 Guide RNA
acacccucccuggcucugcc

SEQ ID NO: 42023 - RNA, 20 nt, Artificial Sequence
  GATA2 Guide RNA
acagcguggaccagaggcag

SEQ ID NO: 42024 - RNA, 20 nt, Artificial Sequence
  GATA2 Guide RNA
acauuccucccaccccgcca

SEQ ID NO: 42025 - RNA, 20 nt, Artificial Sequence
  GATA2 Guide RNA
accaccaguuuucagagggc

SEQ ID NO: 42026 - RNA, 20 nt, Artificial Sequence
  GATA2 Guide RNA
accagaggcaggucaagcug

SEQ ID NO: 42027 - RNA, 20 nt, Artificial Sequence
  GATA2 Guide RNA
accagauggcuaccauucca

SEQ ID NO: 42028 - RNA, 20 nt, Artificial Sequence
  GATA2 Guide RNA
accaguuuucagagggccag

SEQ ID NO: 42029 - RNA, 20 nt, Artificial Sequence
  GATA2 Guide RNA
accauuccaggaagggcggg

SEQ ID NO: 42030 - RNA, 20 nt, Artificial Sequence
  GATA2 Guide RNA
acccacacccucccuggcuc

SEQ ID NO: 42031 - RNA, 20 nt, Artificial Sequence
  GATA2 Guide RNA
accccgccacagcguggacc

SEQ ID NO: 42032 - RNA, 20 nt, Artificial Sequence
  GATA2 Guide RNA
acccgcccuuccuggaaugg

SEQ ID NO: 42033 - RNA, 20 nt, Artificial Sequence
  GATA2 Guide RNA
acccucagcuugaccugccu

SEQ ID NO: 42034 - RNA, 20 nt, Artificial Sequence
  GATA2 Guide RNA
acccucccuggcucugccca

SEQ ID NO: 42035 - RNA, 20 nt, Artificial Sequence
  GATA2 Guide RNA
acccugacccuuuuuaagca

SEQ ID NO: 42036 - RNA, 20 nt, Artificial Sequence
  GATA2 Guide RNA
acccuuuuuaagcagagaaa

SEQ ID NO: 42037 - RNA, 20 nt, Artificial Sequence
  GATA2 Guide RNA
accgcaugccagcacugccc

SEQ ID NO: 42038 - RNA, 20 nt, Artificial Sequence
  GATA2 Guide RNA
accuagaggcaaccaccagu

SEQ ID NO: 42039 - RNA, 20 nt, Artificial Sequence
  GATA2 Guide RNA
accugccucugguccacgcu

SEQ ID NO: 42040 - RNA, 20 nt, Artificial Sequence
  GATA2 Guide RNA
accuucauagucccaucacc

SEQ ID NO: 42041 - RNA, 20 nt, Artificial Sequence
  GATA2 Guide RNA
acgcuguggcggggugggag

SEQ ID NO: 42042 - RNA, 20 nt, Artificial Sequence
  GATA2 Guide RNA
acuagggaagugguuucucu

SEQ ID NO: 42043 - RNA, 20 nt, Artificial Sequence
  GATA2 Guide RNA
acuaugaaggucgggcacaa

SEQ ID NO: 42044 - RNA, 20 nt, Artificial Sequence
  GATA2 Guide RNA
acugcccagccaacugaagu

SEQ ID NO: 42045 - RNA, 20 nt, Artificial Sequence
  GATA2 Guide RNA
acuggcccucugaaaacugg

SEQ ID NO: 42046 - RNA, 20 nt, Artificial Sequence
  GATA2 Guide RNA
acuucaguuggcugggcagu

SEQ ID NO: 42047 - RNA, 20 nt, Artificial Sequence
  GATA2 Guide RNA
agaacccgcccuuccuggaa

SEQ ID NO: 42048 - RNA, 20 nt, Artificial Sequence
  GATA2 Guide RNA
agagccagggaggguguggg

SEQ ID NO: 42049 - RNA, 20 nt, Artificial Sequence
  GATA2 Guide RNA
agaggcaaccaccaguuuuc

SEQ ID NO: 42050 - RNA, 20 nt, Artificial Sequence
  GATA2 Guide RNA
agaggcaggucaagcugagg

SEQ ID NO: 42051 - RNA, 20 nt, Artificial Sequence
  GATA2 Guide RNA
agagggccaguuccuuccuc

SEQ ID NO: 42052 - RNA, 20 nt, Artificial Sequence
  GATA2 Guide RNA
agauggcuaccauuccagga

SEQ ID NO: 42053 - RNA, 20 nt, Artificial Sequence
  GATA2 Guide RNA
agcaacauuccucccacccc

SEQ ID NO: 42054 - RNA, 20 nt, Artificial Sequence
  GATA2 Guide RNA
agcacugcccagccaacuga

SEQ ID NO: 42055 - RNA, 20 nt, Artificial Sequence
  GATA2 Guide RNA
agccaacugaaguccucccc

SEQ ID NO: 42056 - RNA, 20 nt, Artificial Sequence
  GATA2 Guide RNA
agccaggaauugugcccgac

SEQ ID NO: 42057 - RNA, 20 nt, Artificial Sequence
  GATA2 Guide RNA
agccagggaggguguggguc

SEQ ID NO: 42058 - RNA, 20 nt, Artificial Sequence
  GATA2 Guide RNA
agccaucuggugaugggacu

SEQ ID NO: 42059 - RNA, 20 nt, Artificial Sequence
  GATA2 Guide RNA
agccccauaugccagaaccc

SEQ ID NO: 42060 - RNA, 20 nt, Artificial Sequence
  GATA2 Guide RNA
agcguggaccagaggcaggu

SEQ ID NO: 42061 - RNA, 20 nt, Artificial Sequence
  GATA2 Guide RNA
agcugagggucccaggaagc

SEQ ID NO: 42062 - RNA, 20 nt, Artificial Sequence
  GATA2 Guide RNA
agcuugaccugccucugguc

SEQ ID NO: 42063 - RNA, 20 nt, Artificial Sequence
  GATA2 Guide RNA
aggaacuggcccucugaaaa

SEQ ID NO: 42064 - RNA, 20 nt, Artificial Sequence
  GATA2 Guide RNA
aggaagccaggaauugugcc

SEQ ID NO: 42065 - RNA, 20 nt, Artificial Sequence
  GATA2 Guide RNA
aggaaggaacuggcccucug

SEQ ID NO: 42066 - RNA, 20 nt, Artificial Sequence
  GATA2 Guide RNA
aggaagggcggguucuggca

SEQ ID NO: 42067 - RNA, 20 nt, Artificial Sequence
  GATA2 Guide RNA
aggaauguugcuggaggaag

SEQ ID NO: 42068 - RNA, 20 nt, Artificial Sequence
  GATA2 Guide RNA
aggaauugugcccgaccuuc

SEQ ID NO: 42069 - RNA, 20 nt, Artificial Sequence
  GATA2 Guide RNA
aggacuucaguuggcugggc

SEQ ID NO: 42070 - RNA, 20 nt, Artificial Sequence
  GATA2 Guide RNA
aggcaaccaccaguuuucag

SEQ ID NO: 42071 - RNA, 20 nt, Artificial Sequence
  GATA2 Guide RNA
aggcaggucaagcugagggu

SEQ ID NO: 42072 - RNA, 20 nt, Artificial Sequence
  GATA2 Guide RNA
agggaagugguuucucugcu

SEQ ID NO: 42073 - RNA, 20 nt, Artificial Sequence
  GATA2 Guide RNA
agggagggugugggucagcc

SEQ ID NO: 42074 - RNA, 20 nt, Artificial Sequence
  GATA2 Guide RNA
agggccaguuccuuccucca

SEQ ID NO: 42075 - RNA, 20 nt, Artificial Sequence
  GATA2 Guide RNA
agggcggguucuggcauaug

SEQ ID NO: 42076 - RNA, 20 nt, Artificial Sequence
  GATA2 Guide RNA
agggucccaggaagccagga

SEQ ID NO: 42077 - RNA, 20 nt, Artificial Sequence
  GATA2 Guide RNA
agggugugggucagccccau

SEQ ID NO: 42078 - RNA, 20 nt, Artificial Sequence
  GATA2 Guide RNA
aggucaagcugaggguccca

SEQ ID NO: 42079 - RNA, 20 nt, Artificial Sequence
  GATA2 Guide RNA
aggucgggcacaauuccugg

SEQ ID NO: 42080 - RNA, 20 nt, Artificial Sequence
  GATA2 Guide RNA
agucccaucaccagauggcu

SEQ ID NO: 42081 - RNA, 20 nt, Artificial Sequence
  GATA2 Guide RNA
agugcuggcaugcggugggc

SEQ ID NO: 42082 - RNA, 20 nt, Artificial Sequence
  GATA2 Guide RNA
agugguuucucugcuuaaaa

SEQ ID NO: 42083 - RNA, 20 nt, Artificial Sequence
  GATA2 Guide RNA
aguuccuuccuccagcaaca

SEQ ID NO: 42084 - RNA, 20 nt, Artificial Sequence
  GATA2 Guide RNA
aguuggcugggcagugcugg

SEQ ID NO: 42085 - RNA, 20 nt, Artificial Sequence
  GATA2 Guide RNA
aguuuucagagggccaguuc

SEQ ID NO: 42086 - RNA, 20 nt, Artificial Sequence
  GATA2 Guide RNA
auagucccaucaccagaugg

SEQ ID NO: 42087 - RNA, 20 nt, Artificial Sequence
  GATA2 Guide RNA
auaugccagaacccgcccuu

SEQ ID NO: 42088 - RNA, 20 nt, Artificial Sequence
  GATA2 Guide RNA
auauggggcugacccacacc

SEQ ID NO: 42089 - RNA, 20 nt, Artificial Sequence
  GATA2 Guide RNA
aucaccagauggcuaccauu

SEQ ID NO: 42090 - RNA, 20 nt, Artificial Sequence
  GATA2 Guide RNA
aucuggugaugggacuauga

SEQ ID NO: 42091 - RNA, 20 nt, Artificial Sequence
  GATA2 Guide RNA
augaaggucgggcacaauuc

SEQ ID NO: 42092 - RNA, 20 nt, Artificial Sequence
  GATA2 Guide RNA
augccagaacccgcccuucc

SEQ ID NO: 42093 - RNA, 20 nt, Artificial Sequence
  GATA2 Guide RNA
augccagcacugcccagcca

SEQ ID NO: 42094 - RNA, 20 nt, Artificial Sequence
  GATA2 Guide RNA
augcggugggcagagccagg

SEQ ID NO: 42095 - RNA, 20 nt, Artificial Sequence
  GATA2 Guide RNA
auggcuaccauuccaggaag

SEQ ID NO: 42096 - RNA, 20 nt, Artificial Sequence
  GATA2 Guide RNA
augggacuaugaaggucggg

SEQ ID NO: 42097 - RNA, 20 nt, Artificial Sequence
  GATA2 Guide RNA
auggggcugacccacacccu

SEQ ID NO: 42098 - RNA, 20 nt, Artificial Sequence
  GATA2 Guide RNA
augguagccaucuggugaug

SEQ ID NO: 42099 - RNA, 20 nt, Artificial Sequence
  GATA2 Guide RNA
auguugcuggaggaaggaac

SEQ ID NO: 42100 - RNA, 20 nt, Artificial Sequence
  GATA2 Guide RNA
auuccaggaagggcggguuc

SEQ ID NO: 42101 - RNA, 20 nt, Artificial Sequence
  GATA2 Guide RNA
auuccucccaccccgccaca

SEQ ID NO: 42102 - RNA, 20 nt, Artificial Sequence
  GATA2 Guide RNA
auuccuggcuuccugggacc

SEQ ID NO: 42103 - RNA, 20 nt, Artificial Sequence
  GATA2 Guide RNA
auugugcccgaccuucauag

SEQ ID NO: 42104 - RNA, 20 nt, Artificial Sequence
  GATA2 Guide RNA
caacauuccucccaccccgc

SEQ ID NO: 42105 - RNA, 20 nt, Artificial Sequence
  GATA2 Guide RNA
caaccaccaguuuucagagg

SEQ ID NO: 42106 - RNA, 20 nt, Artificial Sequence
  GATA2 Guide RNA
caagcugagggucccaggaa

SEQ ID NO: 42107 - RNA, 20 nt, Artificial Sequence
  GATA2 Guide RNA
caauuccuggcuuccuggga

SEQ ID NO: 42108 - RNA, 20 nt, Artificial Sequence
  GATA2 Guide RNA
cacaauuccuggcuuccugg

SEQ ID NO: 42109 - RNA, 20 nt, Artificial Sequence
  GATA2 Guide RNA
cacacccucccuggcucugc

SEQ ID NO: 42110 - RNA, 20 nt, Artificial Sequence
  GATA2 Guide RNA
cacagcguggaccagaggca

SEQ ID NO: 42111 - RNA, 20 nt, Artificial Sequence
  GATA2 Guide RNA
caccagauggcuaccauucc

SEQ ID NO: 42112 - RNA, 20 nt, Artificial Sequence
  GATA2 Guide RNA
caccaguuuucagagggcca

SEQ ID NO: 42113 - RNA, 20 nt, Artificial Sequence
  GATA2 Guide RNA
caccccgccacagcguggac

SEQ ID NO: 42114 - RNA, 20 nt, Artificial Sequence
  GATA2 Guide RNA
cacccucccuggcucugccc

SEQ ID NO: 42115 - RNA, 20 nt, Artificial Sequence
  GATA2 Guide RNA
cacccugacccuuuuuaagc

SEQ ID NO: 42116 - RNA, 20 nt, Artificial Sequence
  GATA2 Guide RNA
caccgcaugccagcacugcc

SEQ ID NO: 42117 - RNA, 20 nt, Artificial Sequence
  GATA2 Guide RNA
cacgcuguggcgggguggga

SEQ ID NO: 42118 - RNA, 20 nt, Artificial Sequence
  GATA2 Guide RNA
cacugcccagccaacugaag

SEQ ID NO: 42119 - RNA, 20 nt, Artificial Sequence
  GATA2 Guide RNA
cagaacccgcccuuccugga

SEQ ID NO: 42120 - RNA, 20 nt, Artificial Sequence
  GATA2 Guide RNA
cagagccagggagggugugg

SEQ ID NO: 42121 - RNA, 20 nt, Artificial Sequence
  GATA2 Guide RNA
cagaggcaggucaagcugag

SEQ ID NO: 42122 - RNA, 20 nt, Artificial Sequence
  GATA2 Guide RNA
cagagggccaguuccuuccu

SEQ ID NO: 42123 - RNA, 20 nt, Artificial Sequence
  GATA2 Guide RNA
cagauggcuaccauuccagg

SEQ ID NO: 42124 - RNA, 20 nt, Artificial Sequence
  GATA2 Guide RNA
cagcaacauuccucccaccc

SEQ ID NO: 42125 - RNA, 20 nt, Artificial Sequence
  GATA2 Guide RNA
cagcacugcccagccaacug

SEQ ID NO: 42126 - RNA, 20 nt, Artificial Sequence
  GATA2 Guide RNA
cagccaacugaaguccuccc

SEQ ID NO: 42127 - RNA, 20 nt, Artificial Sequence
  GATA2 Guide RNA
cagccccauaugccagaacc

SEQ ID NO: 42128 - RNA, 20 nt, Artificial Sequence
  GATA2 Guide RNA
cagcguggaccagaggcagg

SEQ ID NO: 42129 - RNA, 20 nt, Artificial Sequence
  GATA2 Guide RNA
cagcuugaccugccucuggu

SEQ ID NO: 42130 - RNA, 20 nt, Artificial Sequence
  GATA2 Guide RNA
caggaagccaggaauugugc

SEQ ID NO: 42131 - RNA, 20 nt, Artificial Sequence
  GATA2 Guide RNA
caggaagggcggguucuggc

SEQ ID NO: 42132 - RNA, 20 nt, Artificial Sequence
  GATA2 Guide RNA
caggaauugugcccgaccuu

SEQ ID NO: 42133 - RNA, 20 nt, Artificial Sequence
  GATA2 Guide RNA
cagggagggugugggucagc

SEQ ID NO: 42134 - RNA, 20 nt, Artificial Sequence
  GATA2 Guide RNA
caggucaagcugaggguccc

SEQ ID NO: 42135 - RNA, 20 nt, Artificial Sequence
  GATA2 Guide RNA
cagugcuggcaugcgguggg

SEQ ID NO: 42136 - RNA, 20 nt, Artificial Sequence
  GATA2 Guide RNA
caguuccuuccuccagcaac

SEQ ID NO: 42137 - RNA, 20 nt, Artificial Sequence
  GATA2 Guide RNA
caguuggcugggcagugcug

SEQ ID NO: 42138 - RNA, 20 nt, Artificial Sequence
  GATA2 Guide RNA
caguuuucagagggccaguu

SEQ ID NO: 42139 - RNA, 20 nt, Artificial Sequence
  GATA2 Guide RNA
cauagucccaucaccagaug

SEQ ID NO: 42140 - RNA, 20 nt, Artificial Sequence
  GATA2 Guide RNA
cauaugccagaacccgcccu

SEQ ID NO: 42141 - RNA, 20 nt, Artificial Sequence
  GATA2 Guide RNA
cauauggggcugacccacac

SEQ ID NO: 42142 - RNA, 20 nt, Artificial Sequence
  GATA2 Guide RNA
caucaccagauggcuaccau

SEQ ID NO: 42143 - RNA, 20 nt, Artificial Sequence
  GATA2 Guide RNA
caucuggugaugggacuaug

SEQ ID NO: 42144 - RNA, 20 nt, Artificial Sequence
  GATA2 Guide RNA
caugccagcacugcccagcc

SEQ ID NO: 42145 - RNA, 20 nt, Artificial Sequence
  GATA2 Guide RNA
caugcggugggcagagccag

SEQ ID NO: 42146 - RNA, 20 nt, Artificial Sequence
  GATA2 Guide RNA
cauuccaggaagggcggguu

SEQ ID NO: 42147 - RNA, 20 nt, Artificial Sequence
  GATA2 Guide RNA
cauuccucccaccccgccac

SEQ ID NO: 42148 - RNA, 20 nt, Artificial Sequence
  GATA2 Guide RNA
ccaacugaaguccucccccc

SEQ ID NO: 42149 - RNA, 20 nt, Artificial Sequence
  GATA2 Guide RNA
ccacacccucccuggcucug

SEQ ID NO: 42150 - RNA, 20 nt, Artificial Sequence
  GATA2 Guide RNA
ccacagcguggaccagaggc

SEQ ID NO: 42151 - RNA, 20 nt, Artificial Sequence
  GATA2 Guide RNA
ccaccaguuuucagagggcc

SEQ ID NO: 42152 - RNA, 20 nt, Artificial Sequence
  GATA2 Guide RNA
ccaccccgccacagcgugga

SEQ ID NO: 42153 - RNA, 20 nt, Artificial Sequence
  GATA2 Guide RNA
ccacccugacccuuuuuaag

SEQ ID NO: 42154 - RNA, 20 nt, Artificial Sequence
  GATA2 Guide RNA
ccaccgcaugccagcacugc

SEQ ID NO: 42155 - RNA, 20 nt, Artificial Sequence
  GATA2 Guide RNA
ccacgcuguggcgggguggg

SEQ ID NO: 42156 - RNA, 20 nt, Artificial Sequence
  GATA2 Guide RNA
ccagaacccgcccuuccugg

SEQ ID NO: 42157 - RNA, 20 nt, Artificial Sequence
  GATA2 Guide RNA
ccagaggcaggucaagcuga

SEQ ID NO: 42158 - RNA, 20 nt, Artificial Sequence
  GATA2 Guide RNA
ccagauggcuaccauuccag

SEQ ID NO: 42159 - RNA, 20 nt, Artificial Sequence
  GATA2 Guide RNA
ccagcaacauuccucccacc

SEQ ID NO: 42160 - RNA, 20 nt, Artificial Sequence
  GATA2 Guide RNA
ccagcacugcccagccaacu

SEQ ID NO: 42161 - RNA, 20 nt, Artificial Sequence
  GATA2 Guide RNA
ccagccaacugaaguccucc

SEQ ID NO: 42162 - RNA, 20 nt, Artificial Sequence
  GATA2 Guide RNA
ccaggaagccaggaauugug

SEQ ID NO: 42163 - RNA, 20 nt, Artificial Sequence
  GATA2 Guide RNA
ccaggaagggcggguucugg

SEQ ID NO: 42164 - RNA, 20 nt, Artificial Sequence
  GATA2 Guide RNA
ccaggaauugugcccgaccu

SEQ ID NO: 42165 - RNA, 20 nt, Artificial Sequence
  GATA2 Guide RNA
ccagggagggugugggucag

SEQ ID NO: 42166 - RNA, 20 nt, Artificial Sequence
  GATA2 Guide RNA
ccaguuccuuccuccagcaa

SEQ ID NO: 42167 - RNA, 20 nt, Artificial Sequence
  GATA2 Guide RNA
ccaguuuucagagggccagu

SEQ ID NO: 42168 - RNA, 20 nt, Artificial Sequence
  GATA2 Guide RNA
ccauaugccagaacccgccc

SEQ ID NO: 42169 - RNA, 20 nt, Artificial Sequence
  GATA2 Guide RNA
ccaucaccagauggcuacca

SEQ ID NO: 42170 - RNA, 20 nt, Artificial Sequence
  GATA2 Guide RNA
ccaucuggugaugggacuau

SEQ ID NO: 42171 - RNA, 20 nt, Artificial Sequence
  GATA2 Guide RNA
ccauuccaggaagggcgggu

SEQ ID NO: 42172 - RNA, 20 nt, Artificial Sequence
  GATA2 Guide RNA
cccacacccucccuggcucu

SEQ ID NO: 42173 - RNA, 20 nt, Artificial Sequence
  GATA2 Guide RNA
cccaccccgccacagcgugg

SEQ ID NO: 42174 - RNA, 20 nt, Artificial Sequence
  GATA2 Guide RNA
cccacccugacccuuuuuaa

SEQ ID NO: 42175 - RNA, 20 nt, Artificial Sequence
  GATA2 Guide RNA
cccaccgcaugccagcacug

SEQ ID NO: 42176 - RNA, 20 nt, Artificial Sequence
  GATA2 Guide RNA
cccagccaacugaaguccuc

SEQ ID NO: 42177 - RNA, 20 nt, Artificial Sequence
  GATA2 Guide RNA
cccaggaagccaggaauugu

SEQ ID NO: 42178 - RNA, 20 nt, Artificial Sequence
  GATA2 Guide RNA
cccauaugccagaacccgcc

SEQ ID NO: 42179 - RNA, 20 nt, Artificial Sequence
  GATA2 Guide RNA
cccaucaccagauggcuacc

SEQ ID NO: 42180 - RNA, 20 nt, Artificial Sequence
  GATA2 Guide RNA
ccccacccugacccuuuuua

SEQ ID NO: 42181 - RNA, 20 nt, Artificial Sequence
  GATA2 Guide RNA
ccccauaugccagaacccgc

SEQ ID NO: 42182 - RNA, 20 nt, Artificial Sequence
  GATA2 Guide RNA
cccccacccugacccuuuuu

SEQ ID NO: 42183 - RNA, 20 nt, Artificial Sequence
  GATA2 Guide RNA
ccccccacccugacccuuuu

SEQ ID NO: 42184 - RNA, 20 nt, Artificial Sequence
  GATA2 Guide RNA
ccccgccacagcguggacca

SEQ ID NO: 42185 - RNA, 20 nt, Artificial Sequence
  GATA2 Guide RNA
cccgaccuucauagucccau

SEQ ID NO: 42186 - RNA, 20 nt, Artificial Sequence
  GATA2 Guide RNA
cccgccacagcguggaccag

SEQ ID NO: 42187 - RNA, 20 nt, Artificial Sequence
  GATA2 Guide RNA
cccgcccuuccuggaauggu

SEQ ID NO: 42188 - RNA, 20 nt, Artificial Sequence
  GATA2 Guide RNA
cccucagcuugaccugccuc

SEQ ID NO: 42189 - RNA, 20 nt, Artificial Sequence
  GATA2 Guide RNA
cccucccuggcucugcccac

SEQ ID NO: 42190 - RNA, 20 nt, Artificial Sequence
  GATA2 Guide RNA
cccucugaaaacuggugguu

SEQ ID NO: 42191 - RNA, 20 nt, Artificial Sequence
  GATA2 Guide RNA
cccugacccuuuuuaagcag

SEQ ID NO: 42192 - RNA, 20 nt, Artificial Sequence
  GATA2 Guide RNA
cccuggcucugcccaccgca

SEQ ID NO: 42193 - RNA, 20 nt, Artificial Sequence
  GATA2 Guide RNA
cccuuccuggaaugguagcc

SEQ ID NO: 42194 - RNA, 20 nt, Artificial Sequence
  GATA2 Guide RNA
cccuuuuuaagcagagaaac

SEQ ID NO: 42195 - RNA, 20 nt, Artificial Sequence
  GATA2 Guide RNA
ccgaccuucauagucccauc

SEQ ID NO: 42196 - RNA, 20 nt, Artificial Sequence
  GATA2 Guide RNA
ccgcaugccagcacugccca

SEQ ID NO: 42197 - RNA, 20 nt, Artificial Sequence
  GATA2 Guide RNA
ccgccacagcguggaccaga

SEQ ID NO: 42198 - RNA, 20 nt, Artificial Sequence
  GATA2 Guide RNA
ccgcccuuccuggaauggua

SEQ ID NO: 42199 - RNA, 20 nt, Artificial Sequence
  GATA2 Guide RNA
ccuagaggcaaccaccaguu

SEQ ID NO: 42200 - RNA, 20 nt, Artificial Sequence
  GATA2 Guide RNA
ccucagcuugaccugccucu

SEQ ID NO: 42201 - RNA, 20 nt, Artificial Sequence
  GATA2 Guide RNA
ccuccagcaacauuccuccc

SEQ ID NO: 42202 - RNA, 20 nt, Artificial Sequence
  GATA2 Guide RNA
ccucccaccccgccacagcg

SEQ ID NO: 42203 - RNA, 20 nt, Artificial Sequence
  GATA2 Guide RNA
ccucccuggcucugcccacc

SEQ ID NO: 42204 - RNA, 20 nt, Artificial Sequence
  GATA2 Guide RNA
ccucugaaaacuggugguug

SEQ ID NO: 42205 - RNA, 20 nt, Artificial Sequence
  GATA2 Guide RNA
ccucugguccacgcuguggc

SEQ ID NO: 42206 - RNA, 20 nt, Artificial Sequence
  GATA2 Guide RNA
ccugacccuuuuuaagcaga

SEQ ID NO: 42207 - RNA, 20 nt, Artificial Sequence
  GATA2 Guide RNA
ccugccucugguccacgcug

SEQ ID NO: 42208 - RNA, 20 nt, Artificial Sequence
  GATA2 Guide RNA
ccuggaaugguagccaucug

SEQ ID NO: 42209 - RNA, 20 nt, Artificial Sequence
  GATA2 Guide RNA
ccuggcucugcccaccgcau

SEQ ID NO: 42210 - RNA, 20 nt, Artificial Sequence
  GATA2 Guide RNA
ccuggcuuccugggacccuc

SEQ ID NO: 42211 - RNA, 20 nt, Artificial Sequence
  GATA2 Guide RNA
ccugggacccucagcuugac

SEQ ID NO: 42212 - RNA, 20 nt, Artificial Sequence
  GATA2 Guide RNA
ccuucauagucccaucacca

SEQ ID NO: 42213 - RNA, 20 nt, Artificial Sequence
  GATA2 Guide RNA
ccuuccuccagcaacauucc

SEQ ID NO: 42214 - RNA, 20 nt, Artificial Sequence
  GATA2 Guide RNA
ccuuccuggaaugguagcca

SEQ ID NO: 42215 - RNA, 20 nt, Artificial Sequence
  GATA2 Guide RNA
ccuuuuuaagcagagaaacc

SEQ ID NO: 42216 - RNA, 20 nt, Artificial Sequence
  GATA2 Guide RNA
cgaccuucauagucccauca

SEQ ID NO: 42217 - RNA, 20 nt, Artificial Sequence
  GATA2 Guide RNA
cgcaugccagcacugcccag

SEQ ID NO: 42218 - RNA, 20 nt, Artificial Sequence
  GATA2 Guide RNA
cgccacagcguggaccagag

SEQ ID NO: 42219 - RNA, 20 nt, Artificial Sequence
  GATA2 Guide RNA
cgcccuuccuggaaugguag

SEQ ID NO: 42220 - RNA, 20 nt, Artificial Sequence
  GATA2 Guide RNA
cgcuguggcggggugggagg

SEQ ID NO: 42221 - RNA, 20 nt, Artificial Sequence
  GATA2 Guide RNA
cgggcacaauuccuggcuuc

SEQ ID NO: 42222 - RNA, 20 nt, Artificial Sequence
  GATA2 Guide RNA
cggggugggaggaauguugc

SEQ ID NO: 42223 - RNA, 20 nt, Artificial Sequence
  GATA2 Guide RNA
cggguucuggcauauggggc

SEQ ID NO: 42224 - RNA, 20 nt, Artificial Sequence
  GATA2 Guide RNA
cggugggcagagccagggag

SEQ ID NO: 42225 - RNA, 20 nt, Artificial Sequence
  GATA2 Guide RNA
cguggaccagaggcagguca

SEQ ID NO: 42226 - RNA, 20 nt, Artificial Sequence
  GATA2 Guide RNA
cuaccauuccaggaagggcg

SEQ ID NO: 42227 - RNA, 20 nt, Artificial Sequence
  GATA2 Guide RNA
cuagaggcaaccaccaguuu

SEQ ID NO: 42228 - RNA, 20 nt, Artificial Sequence
  GATA2 Guide RNA
cuagggaagugguuucucug

SEQ ID NO: 42229 - RNA, 20 nt, Artificial Sequence
  GATA2 Guide RNA
cuaugaaggucgggcacaau

SEQ ID NO: 42230 - RNA, 20 nt, Artificial Sequence
  GATA2 Guide RNA
cucagcuugaccugccucug

SEQ ID NO: 42231 - RNA, 20 nt, Artificial Sequence
  GATA2 Guide RNA
cuccagcaacauuccuccca

SEQ ID NO: 42232 - RNA, 20 nt, Artificial Sequence
  GATA2 Guide RNA
cucccaccccgccacagcgu

SEQ ID NO: 42233 - RNA, 20 nt, Artificial Sequence
  GATA2 Guide RNA
cucccuggcucugcccaccg

SEQ ID NO: 42234 - RNA, 20 nt, Artificial Sequence
  GATA2 Guide RNA
cucugaaaacuggugguugc

SEQ ID NO: 42235 - RNA, 20 nt, Artificial Sequence
  GATA2 Guide RNA
cucugcccaccgcaugccag

SEQ ID NO: 42236 - RNA, 20 nt, Artificial Sequence
  GATA2 Guide RNA
cucugcuuaaaaagggucag

SEQ ID NO: 42237 - RNA, 20 nt, Artificial Sequence
  GATA2 Guide RNA
cucugguccacgcuguggcg

SEQ ID NO: 42238 - RNA, 20 nt, Artificial Sequence
  GATA2 Guide RNA
cugacccacacccucccugg

SEQ ID NO: 42239 - RNA, 20 nt, Artificial Sequence
  GATA2 Guide RNA
cugacccuuuuuaagcagag

SEQ ID NO: 42240 - RNA, 20 nt, Artificial Sequence
  GATA2 Guide RNA
cugagggucccaggaagcca

SEQ ID NO: 42241 - RNA, 20 nt, Artificial Sequence
  GATA2 Guide RNA
cugcccaccgcaugccagca

SEQ ID NO: 42242 - RNA, 20 nt, Artificial Sequence
  GATA2 Guide RNA
cugcccagccaacugaaguc

SEQ ID NO: 42243 - RNA, 20 nt, Artificial Sequence
  GATA2 Guide RNA
cugccucugguccacgcugu

SEQ ID NO: 42244 - RNA, 20 nt, Artificial Sequence
  GATA2 Guide RNA
cugcuuaaaaagggucaggg

SEQ ID NO: 42245 - RNA, 20 nt, Artificial Sequence
  GATA2 Guide RNA
cuggaaugguagccaucugg

SEQ ID NO: 42246 - RNA, 20 nt, Artificial Sequence
  GATA2 Guide RNA
cuggaggaaggaacuggccc

SEQ ID NO: 42247 - RNA, 20 nt, Artificial Sequence
  GATA2 Guide RNA
cuggcauauggggcugaccc

SEQ ID NO: 42248 - RNA, 20 nt, Artificial Sequence
  GATA2 Guide RNA
cuggcaugcggugggcagag

SEQ ID NO: 42249 - RNA, 20 nt, Artificial Sequence
  GATA2 Guide RNA
cuggcccucugaaaacuggu

SEQ ID NO: 42250 - RNA, 20 nt, Artificial Sequence
  GATA2 Guide RNA
cuggcucugcccaccgcaug

SEQ ID NO: 42251 - RNA, 20 nt, Artificial Sequence
  GATA2 Guide RNA
cuggcuuccugggacccuca

SEQ ID NO: 42252 - RNA, 20 nt, Artificial Sequence
  GATA2 Guide RNA
cugggacccucagcuugacc

SEQ ID NO: 42253 - RNA, 20 nt, Artificial Sequence
  GATA2 Guide RNA
cugggcagugcuggcaugcg

SEQ ID NO: 42254 - RNA, 20 nt, Artificial Sequence
  GATA2 Guide RNA
cugguccacgcuguggcggg

SEQ ID NO: 42255 - RNA, 20 nt, Artificial Sequence
  GATA2 Guide RNA
cuggugaugggacuaugaag

SEQ ID NO: 42256 - RNA, 20 nt, Artificial Sequence
  GATA2 Guide RNA
cuguggcggggugggaggaa

SEQ ID NO: 42257 - RNA, 20 nt, Artificial Sequence
  GATA2 Guide RNA
cuuaaaaagggucagggugg

SEQ ID NO: 42258 - RNA, 20 nt, Artificial Sequence
  GATA2 Guide RNA
cuucaguuggcugggcagug

SEQ ID NO: 42259 - RNA, 20 nt, Artificial Sequence
  GATA2 Guide RNA
cuucauagucccaucaccag

SEQ ID NO: 42260 - RNA, 20 nt, Artificial Sequence
  GATA2 Guide RNA
cuuccuccagcaacauuccu

SEQ ID NO: 42261 - RNA, 20 nt, Artificial Sequence
  GATA2 Guide RNA
cuuccuggaaugguagccau

SEQ ID NO: 42262 - RNA, 20 nt, Artificial Sequence
  GATA2 Guide RNA
cuuccugggacccucagcuu

SEQ ID NO: 42263 - RNA, 20 nt, Artificial Sequence
  GATA2 Guide RNA
cuugaccugccucuggucca

SEQ ID NO: 42264 - RNA, 20 nt, Artificial Sequence
  GATA2 Guide RNA
cuuuuuaagcagagaaacca

SEQ ID NO: 42265 - RNA, 20 nt, Artificial Sequence
  GATA2 Guide RNA
gaacccgcccuuccuggaau

SEQ ID NO: 42266 - RNA, 20 nt, Artificial Sequence
  GATA2 Guide RNA
gaacuggcccucugaaaacu

SEQ ID NO: 42267 - RNA, 20 nt, Artificial Sequence
  GATA2 Guide RNA
gaagccaggaauugugcccg

SEQ ID NO: 42268 - RNA, 20 nt, Artificial Sequence
  GATA2 Guide RNA
gaaggaacuggcccucugaa

SEQ ID NO: 42269 - RNA, 20 nt, Artificial Sequence
  GATA2 Guide RNA
gaagggcggguucuggcaua

SEQ ID NO: 42270 - RNA, 20 nt, Artificial Sequence
  GATA2 Guide RNA
gaaggucgggcacaauuccu

SEQ ID NO: 42271 - RNA, 20 nt, Artificial Sequence
  GATA2 Guide RNA
gaagugguuucucugcuuaa

SEQ ID NO: 42272 - RNA, 20 nt, Artificial Sequence
  GATA2 Guide RNA
gaaugguagccaucugguga

SEQ ID NO: 42273 - RNA, 20 nt, Artificial Sequence
  GATA2 Guide RNA
gaauguugcuggaggaagga

SEQ ID NO: 42274 - RNA, 20 nt, Artificial Sequence
  GATA2 Guide RNA
gaauugugcccgaccuucau

SEQ ID NO: 42275 - RNA, 20 nt, Artificial Sequence
  GATA2 Guide RNA
gaccagaggcaggucaagcu

SEQ ID NO: 42276 - RNA, 20 nt, Artificial Sequence
  GATA2 Guide RNA
gacccacacccucccuggcu

SEQ ID NO: 42277 - RNA, 20 nt, Artificial Sequence
  GATA2 Guide RNA
gacccucagcuugaccugcc

SEQ ID NO: 42278 - RNA, 20 nt, Artificial Sequence
  GATA2 Guide RNA
gacccuuuuuaagcagagaa

SEQ ID NO: 42279 - RNA, 20 nt, Artificial Sequence
  GATA2 Guide RNA
gaccugccucugguccacgc

SEQ ID NO: 42280 - RNA, 20 nt, Artificial Sequence
  GATA2 Guide RNA
gaccuucauagucccaucac

SEQ ID NO: 42281 - RNA, 20 nt, Artificial Sequence
  GATA2 Guide RNA
gacuaugaaggucgggcaca

SEQ ID NO: 42282 - RNA, 20 nt, Artificial Sequence
  GATA2 Guide RNA
gacuucaguuggcugggcag

SEQ ID NO: 42283 - RNA, 20 nt, Artificial Sequence
  GATA2 Guide RNA
gagccagggagggugugggu

SEQ ID NO: 42284 - RNA, 20 nt, Artificial Sequence
  GATA2 Guide RNA
gaggaaggaacuggcccucu

SEQ ID NO: 42285 - RNA, 20 nt, Artificial Sequence
  GATA2 Guide RNA
gaggaauguugcuggaggaa

SEQ ID NO: 42286 - RNA, 20 nt, Artificial Sequence
  GATA2 Guide RNA
gaggacuucaguuggcuggg

SEQ ID NO: 42287 - RNA, 20 nt, Artificial Sequence
  GATA2 Guide RNA
gaggcaaccaccaguuuuca

SEQ ID NO: 42288 - RNA, 20 nt, Artificial Sequence
  GATA2 Guide RNA
gaggcaggucaagcugaggg

SEQ ID NO: 42289 - RNA, 20 nt, Artificial Sequence
  GATA2 Guide RNA
gagggccaguuccuuccucc

SEQ ID NO: 42290 - RNA, 20 nt, Artificial Sequence
  GATA2 Guide RNA
gagggucccaggaagccagg

SEQ ID NO: 42291 - RNA, 20 nt, Artificial Sequence
  GATA2 Guide RNA
gagggugugggucagcccca

SEQ ID NO: 42292 - RNA, 20 nt, Artificial Sequence
  GATA2 Guide RNA
gauggcuaccauuccaggaa

SEQ ID NO: 42293 - RNA, 20 nt, Artificial Sequence
  GATA2 Guide RNA
gaugggacuaugaaggucgg

SEQ ID NO: 42294 - RNA, 20 nt, Artificial Sequence
  GATA2 Guide RNA
gcaacauuccucccaccccg

SEQ ID NO: 42295 - RNA, 20 nt, Artificial Sequence
  GATA2 Guide RNA
gcaaccaccaguuuucagag

SEQ ID NO: 42296 - RNA, 20 nt, Artificial Sequence
  GATA2 Guide RNA
gcacaauuccuggcuuccug

SEQ ID NO: 42297 - RNA, 20 nt, Artificial Sequence
  GATA2 Guide RNA
gcacugcccagccaacugaa

SEQ ID NO: 42298 - RNA, 20 nt, Artificial Sequence
  GATA2 Guide RNA
gcagagccagggagggugug

SEQ ID NO: 42299 - RNA, 20 nt, Artificial Sequence
  GATA2 Guide RNA
gcaggucaagcugagggucc

SEQ ID NO: 42300 - RNA, 20 nt, Artificial Sequence
  GATA2 Guide RNA
gcagugcuggcaugcggugg

SEQ ID NO: 42301 - RNA, 20 nt, Artificial Sequence
  GATA2 Guide RNA
gcauauggggcugacccaca

SEQ ID NO: 42302 - RNA, 20 nt, Artificial Sequence
  GATA2 Guide RNA
gcaugccagcacugcccagc

SEQ ID NO: 42303 - RNA, 20 nt, Artificial Sequence
  GATA2 Guide RNA
gcaugcggugggcagagcca

SEQ ID NO: 42304 - RNA, 20 nt, Artificial Sequence
  GATA2 Guide RNA
gccaacugaaguccuccccc

SEQ ID NO: 42305 - RNA, 20 nt, Artificial Sequence
  GATA2 Guide RNA
gccacagcguggaccagagg

SEQ ID NO: 42306 - RNA, 20 nt, Artificial Sequence
  GATA2 Guide RNA
gccagaacccgcccuuccug

SEQ ID NO: 42307 - RNA, 20 nt, Artificial Sequence
  GATA2 Guide RNA
gccagcacugcccagccaac

SEQ ID NO: 42308 - RNA, 20 nt, Artificial Sequence
  GATA2 Guide RNA
gccaggaauugugcccgacc

SEQ ID NO: 42309 - RNA, 20 nt, Artificial Sequence
  GATA2 Guide RNA
gccagggaggguguggguca

SEQ ID NO: 42310 - RNA, 20 nt, Artificial Sequence
  GATA2 Guide RNA
gccaguuccuuccuccagca

SEQ ID NO: 42311 - RNA, 20 nt, Artificial Sequence
  GATA2 Guide RNA
gccaucuggugaugggacua

SEQ ID NO: 42312 - RNA, 20 nt, Artificial Sequence
  GATA2 Guide RNA
gcccaccgcaugccagcacu

SEQ ID NO: 42313 - RNA, 20 nt, Artificial Sequence
  GATA2 Guide RNA
gcccagccaacugaaguccu

SEQ ID NO: 42314 - RNA, 20 nt, Artificial Sequence
  GATA2 Guide RNA
gccccauaugccagaacccg

SEQ ID NO: 42315 - RNA, 20 nt, Artificial Sequence
  GATA2 Guide RNA
gcccgaccuucauaguccca

SEQ ID NO: 42316 - RNA, 20 nt, Artificial Sequence
  GATA2 Guide RNA
gcccucugaaaacugguggu

SEQ ID NO: 42317 - RNA, 20 nt, Artificial Sequence
  GATA2 Guide RNA
gcccuuccuggaaugguagc

SEQ ID NO: 42318 - RNA, 20 nt, Artificial Sequence
  GATA2 Guide RNA
gccucugguccacgcugugg

SEQ ID NO: 42319 - RNA, 20 nt, Artificial Sequence
  GATA2 Guide RNA
gcggggugggaggaauguug

SEQ ID NO: 42320 - RNA, 20 nt, Artificial Sequence
  GATA2 Guide RNA
gcggguucuggcauaugggg

SEQ ID NO: 42321 - RNA, 20 nt, Artificial Sequence
  GATA2 Guide RNA
gcggugggcagagccaggga

SEQ ID NO: 42322 - RNA, 20 nt, Artificial Sequence
  GATA2 Guide RNA
gcguggaccagaggcagguc

SEQ ID NO: 42323 - RNA, 20 nt, Artificial Sequence
  GATA2 Guide RNA
gcuaccauuccaggaagggc

SEQ ID NO: 42324 - RNA, 20 nt, Artificial Sequence
  GATA2 Guide RNA
gcucugcccaccgcaugcca

SEQ ID NO: 42325 - RNA, 20 nt, Artificial Sequence
  GATA2 Guide RNA
gcugacccacacccucccug

SEQ ID NO: 42326 - RNA, 20 nt, Artificial Sequence
  GATA2 Guide RNA
gcugagggucccaggaagcc

SEQ ID NO: 42327 - RNA, 20 nt, Artificial Sequence
  GATA2 Guide RNA
gcuggaggaaggaacuggcc

SEQ ID NO: 42328 - RNA, 20 nt, Artificial Sequence
  GATA2 Guide RNA
gcuggcaugcggugggcaga

SEQ ID NO: 42329 - RNA, 20 nt, Artificial Sequence
  GATA2 Guide RNA
gcugggcagugcuggcaugc

SEQ ID NO: 42330 - RNA, 20 nt, Artificial Sequence
  GATA2 Guide RNA
gcuguggcggggugggagga

SEQ ID NO: 42331 - RNA, 20 nt, Artificial Sequence
  GATA2 Guide RNA
gcuuaaaaagggucagggug

SEQ ID NO: 42332 - RNA, 20 nt, Artificial Sequence
  GATA2 Guide RNA
gcuuccugggacccucagcu

SEQ ID NO: 42333 - RNA, 20 nt, Artificial Sequence
  GATA2 Guide RNA
gcuugaccugccucuggucc

SEQ ID NO: 42334 - RNA, 20 nt, Artificial Sequence
  GATA2 Guide RNA
ggaacuggcccucugaaaac

SEQ ID NO: 42335 - RNA, 20 nt, Artificial Sequence
  GATA2 Guide RNA
ggaagccaggaauugugccc

SEQ ID NO: 42336 - RNA, 20 nt, Artificial Sequence
  GATA2 Guide RNA
ggaaggaacuggcccucuga

SEQ ID NO: 42337 - RNA, 20 nt, Artificial Sequence
  GATA2 Guide RNA
ggaagggcggguucuggcau

SEQ ID NO: 42338 - RNA, 20 nt, Artificial Sequence
  GATA2 Guide RNA
ggaagugguuucucugcuua

SEQ ID NO: 42339 - RNA, 20 nt, Artificial Sequence
  GATA2 Guide RNA
ggaaugguagccaucuggug

SEQ ID NO: 42340 - RNA, 20 nt, Artificial Sequence
  GATA2 Guide RNA
ggaauguugcuggaggaagg

SEQ ID NO: 42341 - RNA, 20 nt, Artificial Sequence
  GATA2 Guide RNA
ggaauugugcccgaccuuca

SEQ ID NO: 42342 - RNA, 20 nt, Artificial Sequence
  GATA2 Guide RNA
ggaccagaggcaggucaagc

SEQ ID NO: 42343 - RNA, 20 nt, Artificial Sequence
  GATA2 Guide RNA
ggacccucagcuugaccugc

SEQ ID NO: 42344 - RNA, 20 nt, Artificial Sequence
  GATA2 Guide RNA
ggacuaugaaggucgggcac

SEQ ID NO: 42345 - RNA, 20 nt, Artificial Sequence
  GATA2 Guide RNA
ggacuucaguuggcugggca

SEQ ID NO: 42346 - RNA, 20 nt, Artificial Sequence
  GATA2 Guide RNA
ggaggaaggaacuggcccuc

SEQ ID NO: 42347 - RNA, 20 nt, Artificial Sequence
  GATA2 Guide RNA
ggaggaauguugcuggagga

SEQ ID NO: 42348 - RNA, 20 nt, Artificial Sequence
  GATA2 Guide RNA
ggaggacuucaguuggcugg

SEQ ID NO: 42349 - RNA, 20 nt, Artificial Sequence
  GATA2 Guide RNA
ggagggugugggucagcccc

SEQ ID NO: 42350 - RNA, 20 nt, Artificial Sequence
  GATA2 Guide RNA
ggcaaccaccaguuuucaga

SEQ ID NO: 42351 - RNA, 20 nt, Artificial Sequence
  GATA2 Guide RNA
ggcacaauuccuggcuuccu

SEQ ID NO: 42352 - RNA, 20 nt, Artificial Sequence
  GATA2 Guide RNA
ggcagagccagggagggugu

SEQ ID NO: 42353 - RNA, 20 nt, Artificial Sequence
  GATA2 Guide RNA
ggcaggucaagcugaggguc

SEQ ID NO: 42354 - RNA, 20 nt, Artificial Sequence
  GATA2 Guide RNA
ggcagugcuggcaugcggug

SEQ ID NO: 42355 - RNA, 20 nt, Artificial Sequence
  GATA2 Guide RNA
ggcauauggggcugacccac

SEQ ID NO: 42356 - RNA, 20 nt, Artificial Sequence
  GATA2 Guide RNA
ggcaugcggugggcagagcc

SEQ ID NO: 42357 - RNA, 20 nt, Artificial Sequence
  GATA2 Guide RNA
ggccaguuccuuccuccagc

SEQ ID NO: 42358 - RNA, 20 nt, Artificial Sequence
  GATA2 Guide RNA
ggcccucugaaaacuggugg

SEQ ID NO: 42359 - RNA, 20 nt, Artificial Sequence
  GATA2 Guide RNA
ggcggggugggaggaauguu

SEQ ID NO: 42360 - RNA, 20 nt, Artificial Sequence
  GATA2 Guide RNA
ggcggguucuggcauauggg

SEQ ID NO: 42361 - RNA, 20 nt, Artificial Sequence
  GATA2 Guide RNA
ggcuaccauuccaggaaggg

SEQ ID NO: 42362 - RNA, 20 nt, Artificial Sequence
  GATA2 Guide RNA
ggcucugcccaccgcaugcc

SEQ ID NO: 42363 - RNA, 20 nt, Artificial Sequence
  GATA2 Guide RNA
ggcugacccacacccucccu

SEQ ID NO: 42364 - RNA, 20 nt, Artificial Sequence
  GATA2 Guide RNA
ggcugggcagugcuggcaug

SEQ ID NO: 42365 - RNA, 20 nt, Artificial Sequence
  GATA2 Guide RNA
ggcuuccugggacccucagc

SEQ ID NO: 42366 - RNA, 20 nt, Artificial Sequence
  GATA2 Guide RNA
gggaagugguuucucugcuu

SEQ ID NO: 42367 - RNA, 20 nt, Artificial Sequence
  GATA2 Guide RNA
gggacccucagcuugaccug

SEQ ID NO: 42368 - RNA, 20 nt, Artificial Sequence
  GATA2 Guide RNA
gggacuaugaaggucgggca

SEQ ID NO: 42369 - RNA, 20 nt, Artificial Sequence
  GATA2 Guide RNA
gggaggaauguugcuggagg

SEQ ID NO: 42370 - RNA, 20 nt, Artificial Sequence
  GATA2 Guide RNA
gggaggacuucaguuggcug

SEQ ID NO: 42371 - RNA, 20 nt, Artificial Sequence
  GATA2 Guide RNA
gggagggugugggucagccc

SEQ ID NO: 42372 - RNA, 20 nt, Artificial Sequence
  GATA2 Guide RNA
gggcacaauuccuggcuucc

SEQ ID NO: 42373 - RNA, 20 nt, Artificial Sequence
  GATA2 Guide RNA
gggcagagccagggagggug

SEQ ID NO: 42374 - RNA, 20 nt, Artificial Sequence
  GATA2 Guide RNA
gggcagugcuggcaugcggu

SEQ ID NO: 42375 - RNA, 20 nt, Artificial Sequence
  GATA2 Guide RNA
gggccaguuccuuccuccag

SEQ ID NO: 42376 - RNA, 20 nt, Artificial Sequence
  GATA2 Guide RNA
gggcggguucuggcauaugg

SEQ ID NO: 42377 - RNA, 20 nt, Artificial Sequence
  GATA2 Guide RNA
gggcugacccacacccuccc

SEQ ID NO: 42378 - RNA, 20 nt, Artificial Sequence
  GATA2 Guide RNA
ggggaggacuucaguuggcu

SEQ ID NO: 42379 - RNA, 20 nt, Artificial Sequence
  GATA2 Guide RNA
ggggcugacccacacccucc

SEQ ID NO: 42380 - RNA, 20 nt, Artificial Sequence
  GATA2 Guide RNA
gggggaggacuucaguuggc

SEQ ID NO: 42381 - RNA, 20 nt, Artificial Sequence
  GATA2 Guide RNA
ggggggaggacuucaguugg

SEQ ID NO: 42382 - RNA, 20 nt, Artificial Sequence
  GATA2 Guide RNA
ggggugggaggaauguugcu

SEQ ID NO: 42383 - RNA, 20 nt, Artificial Sequence
  GATA2 Guide RNA
gggucagccccauaugccag

SEQ ID NO: 42384 - RNA, 20 nt, Artificial Sequence
  GATA2 Guide RNA
gggucccaggaagccaggaa

SEQ ID NO: 42385 - RNA, 20 nt, Artificial Sequence
  GATA2 Guide RNA
gggugggaggaauguugcug

SEQ ID NO: 42386 - RNA, 20 nt, Artificial Sequence
  GATA2 Guide RNA
gggugugggucagccccaua

SEQ ID NO: 42387 - RNA, 20 nt, Artificial Sequence
  GATA2 Guide RNA
ggguucuggcauauggggcu

SEQ ID NO: 42388 - RNA, 20 nt, Artificial Sequence
  GATA2 Guide RNA
gguagccaucuggugauggg

SEQ ID NO: 42389 - RNA, 20 nt, Artificial Sequence
  GATA2 Guide RNA
ggucaagcugagggucccag

SEQ ID NO: 42390 - RNA, 20 nt, Artificial Sequence
  GATA2 Guide RNA
ggucagccccauaugccaga

SEQ ID NO: 42391 - RNA, 20 nt, Artificial Sequence
  GATA2 Guide RNA
gguccacgcuguggcggggu

SEQ ID NO: 42392 - RNA, 20 nt, Artificial Sequence
  GATA2 Guide RNA
ggucccaggaagccaggaau

SEQ ID NO: 42393 - RNA, 20 nt, Artificial Sequence
  GATA2 Guide RNA
ggucgggcacaauuccuggc

SEQ ID NO: 42394 - RNA, 20 nt, Artificial Sequence
  GATA2 Guide RNA
ggugaugggacuaugaaggu

SEQ ID NO: 42395 - RNA, 20 nt, Artificial Sequence
  GATA2 Guide RNA
ggugggaggaauguugcugg

SEQ ID NO: 42396 - RNA, 20 nt, Artificial Sequence
  GATA2 Guide RNA
ggugggcagagccagggagg

SEQ ID NO: 42397 - RNA, 20 nt, Artificial Sequence
  GATA2 Guide RNA
ggugugggucagccccauau

SEQ ID NO: 42398 - RNA, 20 nt, Artificial Sequence
  GATA2 Guide RNA
gguucuggcauauggggcug

SEQ ID NO: 42399 - RNA, 20 nt, Artificial Sequence
  GATA2 Guide RNA
gguuucucugcuuaaaaagg

SEQ ID NO: 42400 - RNA, 20 nt, Artificial Sequence
  GATA2 Guide RNA
guagccaucuggugauggga

SEQ ID NO: 42401 - RNA, 20 nt, Artificial Sequence
  GATA2 Guide RNA
gucaagcugagggucccagg

SEQ ID NO: 42402 - RNA, 20 nt, Artificial Sequence
  GATA2 Guide RNA
gucagccccauaugccagaa

SEQ ID NO: 42403 - RNA, 20 nt, Artificial Sequence
  GATA2 Guide RNA
guccacgcuguggcggggug

SEQ ID NO: 42404 - RNA, 20 nt, Artificial Sequence
  GATA2 Guide RNA
gucccaggaagccaggaauu

SEQ ID NO: 42405 - RNA, 20 nt, Artificial Sequence
  GATA2 Guide RNA
gucccaucaccagauggcua

SEQ ID NO: 42406 - RNA, 20 nt, Artificial Sequence
  GATA2 Guide RNA
gucgggcacaauuccuggcu

SEQ ID NO: 42407 - RNA, 20 nt, Artificial Sequence
  GATA2 Guide RNA
gugaugggacuaugaagguc

SEQ ID NO: 42408 - RNA, 20 nt, Artificial Sequence
  GATA2 Guide RNA
gugcccgaccuucauagucc

SEQ ID NO: 42409 - RNA, 20 nt, Artificial Sequence
  GATA2 Guide RNA
gugcuggcaugcggugggca

SEQ ID NO: 42410 - RNA, 20 nt, Artificial Sequence
  GATA2 Guide RNA
guggaccagaggcaggucaa

SEQ ID NO: 42411 - RNA, 20 nt, Artificial Sequence
  GATA2 Guide RNA
guggcggggugggaggaaug

SEQ ID NO: 42412 - RNA, 20 nt, Artificial Sequence
  GATA2 Guide RNA
gugggaggaauguugcugga

SEQ ID NO: 42413 - RNA, 20 nt, Artificial Sequence
  GATA2 Guide RNA
gugggcagagccagggaggg

SEQ ID NO: 42414 - RNA, 20 nt, Artificial Sequence
  GATA2 Guide RNA
gugggucagccccauaugcc

SEQ ID NO: 42415 - RNA, 20 nt, Artificial Sequence
  GATA2 Guide RNA
gugguuucucugcuuaaaaa

SEQ ID NO: 42416 - RNA, 20 nt, Artificial Sequence
  GATA2 Guide RNA
gugugggucagccccauaug

SEQ ID NO: 42417 - RNA, 20 nt, Artificial Sequence
  GATA2 Guide RNA
guuccuuccuccagcaacau

SEQ ID NO: 42418 - RNA, 20 nt, Artificial Sequence
  GATA2 Guide RNA
guucuggcauauggggcuga

SEQ ID NO: 42419 - RNA, 20 nt, Artificial Sequence
  GATA2 Guide RNA
guugcuggaggaaggaacug

SEQ ID NO: 42420 - RNA, 20 nt, Artificial Sequence
  GATA2 Guide RNA
guuggcugggcagugcuggc

SEQ ID NO: 42421 - RNA, 20 nt, Artificial Sequence
  GATA2 Guide RNA
guuucucugcuuaaaaaggg

SEQ ID NO: 42422 - RNA, 20 nt, Artificial Sequence
  GATA2 Guide RNA
guuuucagagggccaguucc

SEQ ID NO: 42423 - RNA, 20 nt, Artificial Sequence
  GATA2 Guide RNA
uaaaaagggucagggugggg

SEQ ID NO: 42424 - RNA, 20 nt, Artificial Sequence
  GATA2 Guide RNA
uaagcagagaaaccacuucc

SEQ ID NO: 42425 - RNA, 20 nt, Artificial Sequence
  GATA2 Guide RNA
uaccauuccaggaagggcgg

SEQ ID NO: 42426 - RNA, 20 nt, Artificial Sequence
  GATA2 Guide RNA
uagaggcaaccaccaguuuu

SEQ ID NO: 42427 - RNA, 20 nt, Artificial Sequence
  GATA2 Guide RNA
uagccaucuggugaugggac

SEQ ID NO: 42428 - RNA, 20 nt, Artificial Sequence
  GATA2 Guide RNA
uagggaagugguuucucugc

SEQ ID NO: 42429 - RNA, 20 nt, Artificial Sequence
  GATA2 Guide RNA
uagucccaucaccagauggc

SEQ ID NO: 42430 - RNA, 20 nt, Artificial Sequence
  GATA2 Guide RNA
uaugaaggucgggcacaauu

SEQ ID NO: 42431 - RNA, 20 nt, Artificial Sequence
  GATA2 Guide RNA
uaugccagaacccgcccuuc

SEQ ID NO: 42432 - RNA, 20 nt, Artificial Sequence
  GATA2 Guide RNA
uauggggcugacccacaccc

SEQ ID NO: 42433 - RNA, 20 nt, Artificial Sequence
  GATA2 Guide RNA
ucaagcugagggucccagga

SEQ ID NO: 42434 - RNA, 20 nt, Artificial Sequence
  GATA2 Guide RNA
ucaccagauggcuaccauuc

SEQ ID NO: 42435 - RNA, 20 nt, Artificial Sequence
  GATA2 Guide RNA
ucagagggccaguuccuucc

SEQ ID NO: 42436 - RNA, 20 nt, Artificial Sequence
  GATA2 Guide RNA
ucagccccauaugccagaac

SEQ ID NO: 42437 - RNA, 20 nt, Artificial Sequence
  GATA2 Guide RNA
ucagcuugaccugccucugg

SEQ ID NO: 42438 - RNA, 20 nt, Artificial Sequence
  GATA2 Guide RNA
ucaguuggcugggcagugcu

SEQ ID NO: 42439 - RNA, 20 nt, Artificial Sequence
  GATA2 Guide RNA
ucauagucccaucaccagau

SEQ ID NO: 42440 - RNA, 20 nt, Artificial Sequence
  GATA2 Guide RNA
uccacgcuguggcggggugg

SEQ ID NO: 42441 - RNA, 20 nt, Artificial Sequence
  GATA2 Guide RNA
uccagcaacauuccucccac

SEQ ID NO: 42442 - RNA, 20 nt, Artificial Sequence
  GATA2 Guide RNA
uccaggaagggcggguucug

SEQ ID NO: 42443 - RNA, 20 nt, Artificial Sequence
  GATA2 Guide RNA
ucccaccccgccacagcgug

SEQ ID NO: 42444 - RNA, 20 nt, Artificial Sequence
  GATA2 Guide RNA
ucccaggaagccaggaauug

SEQ ID NO: 42445 - RNA, 20 nt, Artificial Sequence
  GATA2 Guide RNA
ucccaucaccagauggcuac

SEQ ID NO: 42446 - RNA, 20 nt, Artificial Sequence
  GATA2 Guide RNA
ucccuggcucugcccaccgc

SEQ ID NO: 42447 - RNA, 20 nt, Artificial Sequence
  GATA2 Guide RNA
uccuccagcaacauuccucc

SEQ ID NO: 42448 - RNA, 20 nt, Artificial Sequence
  GATA2 Guide RNA
uccucccaccccgccacagc

SEQ ID NO: 42449 - RNA, 20 nt, Artificial Sequence
  GATA2 Guide RNA
uccuggaaugguagccaucu

SEQ ID NO: 42450 - RNA, 20 nt, Artificial Sequence
  GATA2 Guide RNA
uccuggcuuccugggacccu

SEQ ID NO: 42451 - RNA, 20 nt, Artificial Sequence
  GATA2 Guide RNA
uccugggacccucagcuuga

SEQ ID NO: 42452 - RNA, 20 nt, Artificial Sequence
  GATA2 Guide RNA
uccuuccuccagcaacauuc

SEQ ID NO: 42453 - RNA, 20 nt, Artificial Sequence
  GATA2 Guide RNA
ucgggcacaauuccuggcuu

SEQ ID NO: 42454 - RNA, 20 nt, Artificial Sequence
  GATA2 Guide RNA
ucucugcuuaaaaaggguca

SEQ ID NO: 42455 - RNA, 20 nt, Artificial Sequence
  GATA2 Guide RNA
ucugaaaacuggugguugcc

SEQ ID NO: 42456 - RNA, 20 nt, Artificial Sequence
  GATA2 Guide RNA
ucugcccaccgcaugccagc

SEQ ID NO: 42457 - RNA, 20 nt, Artificial Sequence
  GATA2 Guide RNA
ucugcuuaaaaagggucagg

SEQ ID NO: 42458 - RNA, 20 nt, Artificial Sequence
  GATA2 Guide RNA
ucuggcauauggggcugacc

SEQ ID NO: 42459 - RNA, 20 nt, Artificial Sequence
  GATA2 Guide RNA
ucugguccacgcuguggcgg

SEQ ID NO: 42460 - RNA, 20 nt, Artificial Sequence
  GATA2 Guide RNA
ucuggugaugggacuaugaa

SEQ ID NO: 42461 - RNA, 20 nt, Artificial Sequence
  GATA2 Guide RNA
ugaaggucgggcacaauucc

SEQ ID NO: 42462 - RNA, 20 nt, Artificial Sequence
  GATA2 Guide RNA
ugacccacacccucccuggc

SEQ ID NO: 42463 - RNA, 20 nt, Artificial Sequence
  GATA2 Guide RNA
ugacccuuuuuaagcagaga

SEQ ID NO: 42464 - RNA, 20 nt, Artificial Sequence
  GATA2 Guide RNA
ugaccugccucugguccacg

SEQ ID NO: 42465 - RNA, 20 nt, Artificial Sequence
  GATA2 Guide RNA
ugagggucccaggaagccag

SEQ ID NO: 42466 - RNA, 20 nt, Artificial Sequence
  GATA2 Guide RNA
ugaugggacuaugaaggucg

SEQ ID NO: 42467 - RNA, 20 nt, Artificial Sequence
  GATA2 Guide RNA
ugccagaacccgcccuuccu

SEQ ID NO: 42468 - RNA, 20 nt, Artificial Sequence
  GATA2 Guide RNA
ugccagcacugcccagccaa

SEQ ID NO: 42469 - RNA, 20 nt, Artificial Sequence
  GATA2 Guide RNA
ugcccaccgcaugccagcac

SEQ ID NO: 42470 - RNA, 20 nt, Artificial Sequence
  GATA2 Guide RNA
ugcccagccaacugaagucc

SEQ ID NO: 42471 - RNA, 20 nt, Artificial Sequence
  GATA2 Guide RNA
ugcccgaccuucauaguccc

SEQ ID NO: 42472 - RNA, 20 nt, Artificial Sequence
  GATA2 Guide RNA
ugccucugguccacgcugug

SEQ ID NO: 42473 - RNA, 20 nt, Artificial Sequence
  GATA2 Guide RNA
ugcggugggcagagccaggg

SEQ ID NO: 42474 - RNA, 20 nt, Artificial Sequence
  GATA2 Guide RNA
ugcuggaggaaggaacuggc

SEQ ID NO: 42475 - RNA, 20 nt, Artificial Sequence
  GATA2 Guide RNA
ugcuggcaugcggugggcag

SEQ ID NO: 42476 - RNA, 20 nt, Artificial Sequence
  GATA2 Guide RNA
ugcuuaaaaagggucagggu

SEQ ID NO: 42477 - RNA, 20 nt, Artificial Sequence
  GATA2 Guide RNA
uggaaugguagccaucuggu

SEQ ID NO: 42478 - RNA, 20 nt, Artificial Sequence
  GATA2 Guide RNA
uggaccagaggcaggucaag

SEQ ID NO: 42479 - RNA, 20 nt, Artificial Sequence
  GATA2 Guide RNA
uggaggaaggaacuggcccu

SEQ ID NO: 42480 - RNA, 20 nt, Artificial Sequence
  GATA2 Guide RNA
uggcauauggggcugaccca

SEQ ID NO: 42481 - RNA, 20 nt, Artificial Sequence
  GATA2 Guide RNA
uggcaugcggugggcagagc

SEQ ID NO: 42482 - RNA, 20 nt, Artificial Sequence
  GATA2 Guide RNA
uggcccucugaaaacuggug

SEQ ID NO: 42483 - RNA, 20 nt, Artificial Sequence
  GATA2 Guide RNA
uggcggggugggaggaaugu

SEQ ID NO: 42484 - RNA, 20 nt, Artificial Sequence
  GATA2 Guide RNA
uggcuaccauuccaggaagg

SEQ ID NO: 42485 - RNA, 20 nt, Artificial Sequence
  GATA2 Guide RNA
uggcucugcccaccgcaugc

SEQ ID NO: 42486 - RNA, 20 nt, Artificial Sequence
  GATA2 Guide RNA
uggcugggcagugcuggcau

SEQ ID NO: 42487 - RNA, 20 nt, Artificial Sequence
  GATA2 Guide RNA
uggcuuccugggacccucag

SEQ ID NO: 42488 - RNA, 20 nt, Artificial Sequence
  GATA2 Guide RNA
ugggacccucagcuugaccu

SEQ ID NO: 42489 - RNA, 20 nt, Artificial Sequence
  GATA2 Guide RNA
ugggacuaugaaggucgggc

SEQ ID NO: 42490 - RNA, 20 nt, Artificial Sequence
  GATA2 Guide RNA
ugggaggaauguugcuggag

SEQ ID NO: 42491 - RNA, 20 nt, Artificial Sequence
  GATA2 Guide RNA
ugggcagagccagggagggu

SEQ ID NO: 42492 - RNA, 20 nt, Artificial Sequence
  GATA2 Guide RNA
ugggcagugcuggcaugcgg

SEQ ID NO: 42493 - RNA, 20 nt, Artificial Sequence
  GATA2 Guide RNA
uggggcugacccacacccuc

SEQ ID NO: 42494 - RNA, 20 nt, Artificial Sequence
  GATA2 Guide RNA
ugggucagccccauaugcca

SEQ ID NO: 42495 - RNA, 20 nt, Artificial Sequence
  GATA2 Guide RNA
ugguagccaucuggugaugg

SEQ ID NO: 42496 - RNA, 20 nt, Artificial Sequence
  GATA2 Guide RNA
ugguccacgcuguggcgggg

SEQ ID NO: 42497 - RNA, 20 nt, Artificial Sequence
  GATA2 Guide RNA
uggugaugggacuaugaagg

SEQ ID NO: 42498 - RNA, 20 nt, Artificial Sequence
  GATA2 Guide RNA
ugguuucucugcuuaaaaag

SEQ ID NO: 42499 - RNA, 20 nt, Artificial Sequence
  GATA2 Guide RNA
ugugcccgaccuucauaguc

SEQ ID NO: 42500 - RNA, 20 nt, Artificial Sequence
  GATA2 Guide RNA
uguggcggggugggaggaau

SEQ ID NO: 42501 - RNA, 20 nt, Artificial Sequence
  GATA2 Guide RNA
ugugggucagccccauaugc

SEQ ID NO: 42502 - RNA, 20 nt, Artificial Sequence
  GATA2 Guide RNA
uguugcuggaggaaggaacu

SEQ ID NO: 42503 - RNA, 20 nt, Artificial Sequence
  GATA2 Guide RNA
uuaaaaagggucaggguggg

SEQ ID NO: 42504 - RNA, 20 nt, Artificial Sequence
  GATA2 Guide RNA
uuaagcagagaaaccacuuc

SEQ ID NO: 42505 - RNA, 20 nt, Artificial Sequence
  GATA2 Guide RNA
uucagagggccaguuccuuc

SEQ ID NO: 42506 - RNA, 20 nt, Artificial Sequence
  GATA2 Guide RNA
uucaguuggcugggcagugc

SEQ ID NO: 42507 - RNA, 20 nt, Artificial Sequence
  GATA2 Guide RNA
uucauagucccaucaccaga

SEQ ID NO: 42508 - RNA, 20 nt, Artificial Sequence
  GATA2 Guide RNA
uuccaggaagggcggguucu

SEQ ID NO: 42509 - RNA, 20 nt, Artificial Sequence
  GATA2 Guide RNA
uuccuccagcaacauuccuc

SEQ ID NO: 42510 - RNA, 20 nt, Artificial Sequence
  GATA2 Guide RNA
uuccucccaccccgccacag

SEQ ID NO: 42511 - RNA, 20 nt, Artificial Sequence
  GATA2 Guide RNA
uuccuggaaugguagccauc

SEQ ID NO: 42512 - RNA, 20 nt, Artificial Sequence
  GATA2 Guide RNA
uuccuggcuuccugggaccc

SEQ ID NO: 42513 - RNA, 20 nt, Artificial Sequence
  GATA2 Guide RNA
uuccugggacccucagcuug

SEQ ID NO: 42514 - RNA, 20 nt, Artificial Sequence
  GATA2 Guide RNA
uuccuuccuccagcaacauu

SEQ ID NO: 42515 - RNA, 20 nt, Artificial Sequence
  GATA2 Guide RNA
uucucugcuuaaaaaggguc

SEQ ID NO: 42516 - RNA, 20 nt, Artificial Sequence
  GATA2 Guide RNA
uucuggcauauggggcugac

SEQ ID NO: 42517 - RNA, 20 nt, Artificial Sequence
  GATA2 Guide RNA
uugaccugccucugguccac

SEQ ID NO: 42518 - RNA, 20 nt, Artificial Sequence
  GATA2 Guide RNA
uugcuggaggaaggaacugg

SEQ ID NO: 42519 - RNA, 20 nt, Artificial Sequence
  GATA2 Guide RNA
uuggcugggcagugcuggca

SEQ ID NO: 42520 - RNA, 20 nt, Artificial Sequence
  GATA2 Guide RNA
uugugcccgaccuucauagu

SEQ ID NO: 42521 - RNA, 20 nt, Artificial Sequence
  GATA2 Guide RNA
uuuaagcagagaaaccacuu

SEQ ID NO: 42522 - RNA, 20 nt, Artificial Sequence
  GATA2 Guide RNA
uuucagagggccaguuccuu

SEQ ID NO: 42523 - RNA, 20 nt, Artificial Sequence
  GATA2 Guide RNA
uuucucugcuuaaaaagggu

SEQ ID NO: 42524 - RNA, 20 nt, Artificial Sequence
  GATA2 Guide RNA
uuuuaagcagagaaaccacu

SEQ ID NO: 42525 - RNA, 20 nt, Artificial Sequence
  GATA2 Guide RNA
uuuucagagggccaguuccu

SEQ ID NO: 42526 - RNA, 20 nt, Artificial Sequence
  GATA2 Guide RNA
uuuuuaagcagagaaaccac

SEQ ID NO: 42527 - RNA, 21 nt, Artificial Sequence
  GATA2 Guide RNA
aaaaagggucagggugggggg

SEQ ID NO: 42528 - RNA, 21 nt, Artificial Sequence
  GATA2 Guide RNA
aacauuccucccaccccgcca

SEQ ID NO: 42529 - RNA, 21 nt, Artificial Sequence
  GATA2 Guide RNA
aaccaccaguuuucagagggc

SEQ ID NO: 42530 - RNA, 21 nt, Artificial Sequence
  GATA2 Guide RNA
aacccgcccuuccuggaaugg

SEQ ID NO: 42531 - RNA, 21 nt, Artificial Sequence
  GATA2 Guide RNA
aaccuagaggcaaccaccagu

SEQ ID NO: 42532 - RNA, 21 nt, Artificial Sequence
  GATA2 Guide RNA
aacuggcccucugaaaacugg

SEQ ID NO: 42533 - RNA, 21 nt, Artificial Sequence
  GATA2 Guide RNA
aagccaggaauugugcccgac

SEQ ID NO: 42534 - RNA, 21 nt, Artificial Sequence
  GATA2 Guide RNA
aagcugagggucccaggaagc

SEQ ID NO: 42535 - RNA, 21 nt, Artificial Sequence
  GATA2 Guide RNA
aaggaacuggcccucugaaaa

SEQ ID NO: 42536 - RNA, 21 nt, Artificial Sequence
  GATA2 Guide RNA
aagggcggguucuggcauaug

SEQ ID NO: 42537 - RNA, 21 nt, Artificial Sequence
  GATA2 Guide RNA
aaggucgggcacaauuccugg

SEQ ID NO: 42538 - RNA, 21 nt, Artificial Sequence
  GATA2 Guide RNA
aagugguuucucugcuuaaaa

SEQ ID NO: 42539 - RNA, 21 nt, Artificial Sequence
  GATA2 Guide RNA
aaugguagccaucuggugaug

SEQ ID NO: 42540 - RNA, 21 nt, Artificial Sequence
  GATA2 Guide RNA
aauguugcuggaggaaggaac

SEQ ID NO: 42541 - RNA, 21 nt, Artificial Sequence
  GATA2 Guide RNA
aauuccuggcuuccugggacc

SEQ ID NO: 42542 - RNA, 21 nt, Artificial Sequence
  GATA2 Guide RNA
aauugugcccgaccuucauag

SEQ ID NO: 42543 - RNA, 21 nt, Artificial Sequence
  GATA2 Guide RNA
acaauuccuggcuuccuggga

SEQ ID NO: 42544 - RNA, 21 nt, Artificial Sequence
  GATA2 Guide RNA
acacccucccuggcucugccc

SEQ ID NO: 42545 - RNA, 21 nt, Artificial Sequence
  GATA2 Guide RNA
acagcguggaccagaggcagg

SEQ ID NO: 42546 - RNA, 21 nt, Artificial Sequence
  GATA2 Guide RNA
acauuccucccaccccgccac

SEQ ID NO: 42547 - RNA, 21 nt, Artificial Sequence
  GATA2 Guide RNA
accaccaguuuucagagggcc

SEQ ID NO: 42548 - RNA, 21 nt, Artificial Sequence
  GATA2 Guide RNA
accagaggcaggucaagcuga

SEQ ID NO: 42549 - RNA, 21 nt, Artificial Sequence
  GATA2 Guide RNA
accagauggcuaccauuccag

SEQ ID NO: 42550 - RNA, 21 nt, Artificial Sequence
  GATA2 Guide RNA
accaguuuucagagggccagu

SEQ ID NO: 42551 - RNA, 21 nt, Artificial Sequence
  GATA2 Guide RNA
accauuccaggaagggcgggu

SEQ ID NO: 42552 - RNA, 21 nt, Artificial Sequence
  GATA2 Guide RNA
acccacacccucccuggcucu

SEQ ID NO: 42553 - RNA, 21 nt, Artificial Sequence
  GATA2 Guide RNA
accccgccacagcguggacca

SEQ ID NO: 42554 - RNA, 21 nt, Artificial Sequence
  GATA2 Guide RNA
acccgcccuuccuggaauggu

SEQ ID NO: 42555 - RNA, 21 nt, Artificial Sequence
  GATA2 Guide RNA
acccucagcuugaccugccuc

SEQ ID NO: 42556 - RNA, 21 nt, Artificial Sequence
  GATA2 Guide RNA
acccucccuggcucugcccac

SEQ ID NO: 42557 - RNA, 21 nt, Artificial Sequence
  GATA2 Guide RNA
acccugacccuuuuuaagcag

SEQ ID NO: 42558 - RNA, 21 nt, Artificial Sequence
  GATA2 Guide RNA
acccuuuuuaagcagagaaac

SEQ ID NO: 42559 - RNA, 21 nt, Artificial Sequence
  GATA2 Guide RNA
accgcaugccagcacugccca

SEQ ID NO: 42560 - RNA, 21 nt, Artificial Sequence
  GATA2 Guide RNA
accuagaggcaaccaccaguu

SEQ ID NO: 42561 - RNA, 21 nt, Artificial Sequence
  GATA2 Guide RNA
accugccucugguccacgcug

SEQ ID NO: 42562 - RNA, 21 nt, Artificial Sequence
  GATA2 Guide RNA
accuucauagucccaucacca

SEQ ID NO: 42563 - RNA, 21 nt, Artificial Sequence
  GATA2 Guide RNA
acgcuguggcggggugggagg

SEQ ID NO: 42564 - RNA, 21 nt, Artificial Sequence
  GATA2 Guide RNA
acuagggaagugguuucucug

SEQ ID NO: 42565 - RNA, 21 nt, Artificial Sequence
  GATA2 Guide RNA
acuaugaaggucgggcacaau

SEQ ID NO: 42566 - RNA, 21 nt, Artificial Sequence
  GATA2 Guide RNA
acugcccagccaacugaaguc

SEQ ID NO: 42567 - RNA, 21 nt, Artificial Sequence
  GATA2 Guide RNA
acuggcccucugaaaacuggu

SEQ ID NO: 42568 - RNA, 21 nt, Artificial Sequence
  GATA2 Guide RNA
acuucaguuggcugggcagug

SEQ ID NO: 42569 - RNA, 21 nt, Artificial Sequence
  GATA2 Guide RNA
agaacccgcccuuccuggaau

SEQ ID NO: 42570 - RNA, 21 nt, Artificial Sequence
  GATA2 Guide RNA
agagccagggagggugugggu

SEQ ID NO: 42571 - RNA, 21 nt, Artificial Sequence
  GATA2 Guide RNA
agaggcaaccaccaguuuuca

SEQ ID NO: 42572 - RNA, 21 nt, Artificial Sequence
  GATA2 Guide RNA
agaggcaggucaagcugaggg

SEQ ID NO: 42573 - RNA, 21 nt, Artificial Sequence
  GATA2 Guide RNA
agagggccaguuccuuccucc

SEQ ID NO: 42574 - RNA, 21 nt, Artificial Sequence
  GATA2 Guide RNA
agauggcuaccauuccaggaa

SEQ ID NO: 42575 - RNA, 21 nt, Artificial Sequence
  GATA2 Guide RNA
agcaacauuccucccaccccg

SEQ ID NO: 42576 - RNA, 21 nt, Artificial Sequence
  GATA2 Guide RNA
agcacugcccagccaacugaa

SEQ ID NO: 42577 - RNA, 21 nt, Artificial Sequence
  GATA2 Guide RNA
agccaacugaaguccuccccc

SEQ ID NO: 42578 - RNA, 21 nt, Artificial Sequence
  GATA2 Guide RNA
agccaggaauugugcccgacc

SEQ ID NO: 42579 - RNA, 21 nt, Artificial Sequence
  GATA2 Guide RNA
agccagggaggguguggguca

SEQ ID NO: 42580 - RNA, 21 nt, Artificial Sequence
  GATA2 Guide RNA
agccaucuggugaugggacua

SEQ ID NO: 42581 - RNA, 21 nt, Artificial Sequence
  GATA2 Guide RNA
agccccauaugccagaacccg

SEQ ID NO: 42582 - RNA, 21 nt, Artificial Sequence
  GATA2 Guide RNA
agcguggaccagaggcagguc

SEQ ID NO: 42583 - RNA, 21 nt, Artificial Sequence
  GATA2 Guide RNA
agcugagggucccaggaagcc

SEQ ID NO: 42584 - RNA, 21 nt, Artificial Sequence
  GATA2 Guide RNA
agcuugaccugccucuggucc

SEQ ID NO: 42585 - RNA, 21 nt, Artificial Sequence
  GATA2 Guide RNA
aggaacuggcccucugaaaac

SEQ ID NO: 42586 - RNA, 21 nt, Artificial Sequence
  GATA2 Guide RNA
aggaagccaggaauugugccc

SEQ ID NO: 42587 - RNA, 21 nt, Artificial Sequence
  GATA2 Guide RNA
aggaaggaacuggcccucuga

SEQ ID NO: 42588 - RNA, 21 nt, Artificial Sequence
  GATA2 Guide RNA
aggaagggcggguucuggcau

SEQ ID NO: 42589 - RNA, 21 nt, Artificial Sequence
  GATA2 Guide RNA
aggaauguugcuggaggaagg

SEQ ID NO: 42590 - RNA, 21 nt, Artificial Sequence
  GATA2 Guide RNA
aggaauugugcccgaccuuca

SEQ ID NO: 42591 - RNA, 21 nt, Artificial Sequence
  GATA2 Guide RNA
aggacuucaguuggcugggca

SEQ ID NO: 42592 - RNA, 21 nt, Artificial Sequence
  GATA2 Guide RNA
aggcaaccaccaguuuucaga

SEQ ID NO: 42593 - RNA, 21 nt, Artificial Sequence
  GATA2 Guide RNA
aggcaggucaagcugaggguc

SEQ ID NO: 42594 - RNA, 21 nt, Artificial Sequence
  GATA2 Guide RNA
agggaagugguuucucugcuu

SEQ ID NO: 42595 - RNA, 21 nt, Artificial Sequence
  GATA2 Guide RNA
agggagggugugggucagccc

SEQ ID NO: 42596 - RNA, 21 nt, Artificial Sequence
  GATA2 Guide RNA
agggccaguuccuuccuccag

SEQ ID NO: 42597 - RNA, 21 nt, Artificial Sequence
  GATA2 Guide RNA
agggcggguucuggcauaugg

SEQ ID NO: 42598 - RNA, 21 nt, Artificial Sequence
  GATA2 Guide RNA
agggucccaggaagccaggaa

SEQ ID NO: 42599 - RNA, 21 nt, Artificial Sequence
  GATA2 Guide RNA
agggugugggucagccccaua

SEQ ID NO: 42600 - RNA, 21 nt, Artificial Sequence
  GATA2 Guide RNA
aggucaagcugagggucccag

SEQ ID NO: 42601 - RNA, 21 nt, Artificial Sequence
  GATA2 Guide RNA
aggucgggcacaauuccuggc

SEQ ID NO: 42602 - RNA, 21 nt, Artificial Sequence
  GATA2 Guide RNA
agucccaucaccagauggcua

SEQ ID NO: 42603 - RNA, 21 nt, Artificial Sequence
  GATA2 Guide RNA
agugcuggcaugcggugggca

SEQ ID NO: 42604 - RNA, 21 nt, Artificial Sequence
  GATA2 Guide RNA
agugguuucucugcuuaaaaa

SEQ ID NO: 42605 - RNA, 21 nt, Artificial Sequence
  GATA2 Guide RNA
aguuccuuccuccagcaacau

SEQ ID NO: 42606 - RNA, 21 nt, Artificial Sequence
  GATA2 Guide RNA
aguuggcugggcagugcuggc

SEQ ID NO: 42607 - RNA, 21 nt, Artificial Sequence
  GATA2 Guide RNA
aguuuucagagggccaguucc

SEQ ID NO: 42608 - RNA, 21 nt, Artificial Sequence
  GATA2 Guide RNA
auagucccaucaccagauggc

SEQ ID NO: 42609 - RNA, 21 nt, Artificial Sequence
  GATA2 Guide RNA
auaugccagaacccgcccuuc

SEQ ID NO: 42610 - RNA, 21 nt, Artificial Sequence
  GATA2 Guide RNA
auauggggcugacccacaccc

SEQ ID NO: 42611 - RNA, 21 nt, Artificial Sequence
  GATA2 Guide RNA
aucaccagauggcuaccauuc

SEQ ID NO: 42612 - RNA, 21 nt, Artificial Sequence
  GATA2 Guide RNA
aucuggugaugggacuaugaa

SEQ ID NO: 42613 - RNA, 21 nt, Artificial Sequence
  GATA2 Guide RNA
augaaggucgggcacaauucc

SEQ ID NO: 42614 - RNA, 21 nt, Artificial Sequence
  GATA2 Guide RNA
augccagaacccgcccuuccu

SEQ ID NO: 42615 - RNA, 21 nt, Artificial Sequence
  GATA2 Guide RNA
augccagcacugcccagccaa

SEQ ID NO: 42616 - RNA, 21 nt, Artificial Sequence
  GATA2 Guide RNA
augcggugggcagagccaggg

SEQ ID NO: 42617 - RNA, 21 nt, Artificial Sequence
  GATA2 Guide RNA
auggcuaccauuccaggaagg

SEQ ID NO: 42618 - RNA, 21 nt, Artificial Sequence
  GATA2 Guide RNA
augggacuaugaaggucgggc

SEQ ID NO: 42619 - RNA, 21 nt, Artificial Sequence
  GATA2 Guide RNA
auggggcugacccacacccuc

SEQ ID NO: 42620 - RNA, 21 nt, Artificial Sequence
  GATA2 Guide RNA
augguagccaucuggugaugg

SEQ ID NO: 42621 - RNA, 21 nt, Artificial Sequence
  GATA2 Guide RNA
auguugcuggaggaaggaacu

SEQ ID NO: 42622 - RNA, 21 nt, Artificial Sequence
  GATA2 Guide RNA
auuccaggaagggcggguucu

SEQ ID NO: 42623 - RNA, 21 nt, Artificial Sequence
  GATA2 Guide RNA
auuccucccaccccgccacag

SEQ ID NO: 42624 - RNA, 21 nt, Artificial Sequence
  GATA2 Guide RNA
auuccuggcuuccugggaccc

SEQ ID NO: 42625 - RNA, 21 nt, Artificial Sequence
  GATA2 Guide RNA
auugugcccgaccuucauagu

SEQ ID NO: 42626 - RNA, 21 nt, Artificial Sequence
  GATA2 Guide RNA
caacauuccucccaccccgcc

SEQ ID NO: 42627 - RNA, 21 nt, Artificial Sequence
  GATA2 Guide RNA
caaccaccaguuuucagaggg

SEQ ID NO: 42628 - RNA, 21 nt, Artificial Sequence
  GATA2 Guide RNA
caagcugagggucccaggaag

SEQ ID NO: 42629 - RNA, 21 nt, Artificial Sequence
  GATA2 Guide RNA
caauuccuggcuuccugggac

SEQ ID NO: 42630 - RNA, 21 nt, Artificial Sequence
  GATA2 Guide RNA
cacaauuccuggcuuccuggg

SEQ ID NO: 42631 - RNA, 21 nt, Artificial Sequence
  GATA2 Guide RNA
cacacccucccuggcucugcc

SEQ ID NO: 42632 - RNA, 21 nt, Artificial Sequence
  GATA2 Guide RNA
cacagcguggaccagaggcag

SEQ ID NO: 42633 - RNA, 21 nt, Artificial Sequence
  GATA2 Guide RNA
caccagauggcuaccauucca

SEQ ID NO: 42634 - RNA, 21 nt, Artificial Sequence
  GATA2 Guide RNA
caccaguuuucagagggccag

SEQ ID NO: 42635 - RNA, 21 nt, Artificial Sequence
  GATA2 Guide RNA
caccccgccacagcguggacc

SEQ ID NO: 42636 - RNA, 21 nt, Artificial Sequence
  GATA2 Guide RNA
cacccucccuggcucugccca

SEQ ID NO: 42637 - RNA, 21 nt, Artificial Sequence
  GATA2 Guide RNA
cacccugacccuuuuuaagca

SEQ ID NO: 42638 - RNA, 21 nt, Artificial Sequence
  GATA2 Guide RNA
caccgcaugccagcacugccc

SEQ ID NO: 42639 - RNA, 21 nt, Artificial Sequence
  GATA2 Guide RNA
cacgcuguggcggggugggag

SEQ ID NO: 42640 - RNA, 21 nt, Artificial Sequence
  GATA2 Guide RNA
cacugcccagccaacugaagu

SEQ ID NO: 42641 - RNA, 21 nt, Artificial Sequence
  GATA2 Guide RNA
cagaacccgcccuuccuggaa

SEQ ID NO: 42642 - RNA, 21 nt, Artificial Sequence
  GATA2 Guide RNA
cagagccagggaggguguggg

SEQ ID NO: 42643 - RNA, 21 nt, Artificial Sequence
  GATA2 Guide RNA
cagaggcaggucaagcugagg

SEQ ID NO: 42644 - RNA, 21 nt, Artificial Sequence
  GATA2 Guide RNA
cagagggccaguuccuuccuc

SEQ ID NO: 42645 - RNA, 21 nt, Artificial Sequence
  GATA2 Guide RNA
cagauggcuaccauuccagga

SEQ ID NO: 42646 - RNA, 21 nt, Artificial Sequence
  GATA2 Guide RNA
cagcaacauuccucccacccc

SEQ ID NO: 42647 - RNA, 21 nt, Artificial Sequence
  GATA2 Guide RNA
cagcacugcccagccaacuga

SEQ ID NO: 42648 - RNA, 21 nt, Artificial Sequence
  GATA2 Guide RNA
cagccaacugaaguccucccc

SEQ ID NO: 42649 - RNA, 21 nt, Artificial Sequence
  GATA2 Guide RNA
cagccccauaugccagaaccc

SEQ ID NO: 42650 - RNA, 21 nt, Artificial Sequence
  GATA2 Guide RNA
cagcguggaccagaggcaggu

SEQ ID NO: 42651 - RNA, 21 nt, Artificial Sequence
  GATA2 Guide RNA
cagcuugaccugccucugguc

SEQ ID NO: 42652 - RNA, 21 nt, Artificial Sequence
  GATA2 Guide RNA
caggaagccaggaauugugcc

SEQ ID NO: 42653 - RNA, 21 nt, Artificial Sequence
  GATA2 Guide RNA
caggaagggcggguucuggca

SEQ ID NO: 42654 - RNA, 21 nt, Artificial Sequence
  GATA2 Guide RNA
caggaauugugcccgaccuuc

SEQ ID NO: 42655 - RNA, 21 nt, Artificial Sequence
  GATA2 Guide RNA
cagggagggugugggucagcc

SEQ ID NO: 42656 - RNA, 21 nt, Artificial Sequence
  GATA2 Guide RNA
caggucaagcugaggguccca

SEQ ID NO: 42657 - RNA, 21 nt, Artificial Sequence
  GATA2 Guide RNA
cagugcuggcaugcggugggc

SEQ ID NO: 42658 - RNA, 21 nt, Artificial Sequence
  GATA2 Guide RNA
caguuccuuccuccagcaaca

SEQ ID NO: 42659 - RNA, 21 nt, Artificial Sequence
  GATA2 Guide RNA
caguuggcugggcagugcugg

SEQ ID NO: 42660 - RNA, 21 nt, Artificial Sequence
  GATA2 Guide RNA
caguuuucagagggccaguuc

SEQ ID NO: 42661 - RNA, 21 nt, Artificial Sequence
  GATA2 Guide RNA
cauagucccaucaccagaugg

SEQ ID NO: 42662 - RNA, 21 nt, Artificial Sequence
  GATA2 Guide RNA
cauaugccagaacccgcccuu

SEQ ID NO: 42663 - RNA, 21 nt, Artificial Sequence
  GATA2 Guide RNA
cauauggggcugacccacacc

SEQ ID NO: 42664 - RNA, 21 nt, Artificial Sequence
  GATA2 Guide RNA
caucaccagauggcuaccauu

SEQ ID NO: 42665 - RNA, 21 nt, Artificial Sequence
  GATA2 Guide RNA
caucuggugaugggacuauga

SEQ ID NO: 42666 - RNA, 21 nt, Artificial Sequence
  GATA2 Guide RNA
caugccagcacugcccagcca

SEQ ID NO: 42667 - RNA, 21 nt, Artificial Sequence
  GATA2 Guide RNA
caugcggugggcagagccagg

SEQ ID NO: 42668 - RNA, 21 nt, Artificial Sequence
  GATA2 Guide RNA
cauuccaggaagggcggguuc

SEQ ID NO: 42669 - RNA, 21 nt, Artificial Sequence
  GATA2 Guide RNA
cauuccucccaccccgccaca

SEQ ID NO: 42670 - RNA, 21 nt, Artificial Sequence
  GATA2 Guide RNA
ccacacccucccuggcucugc

SEQ ID NO: 42671 - RNA, 21 nt, Artificial Sequence
  GATA2 Guide RNA
ccacagcguggaccagaggca

SEQ ID NO: 42672 - RNA, 21 nt, Artificial Sequence
  GATA2 Guide RNA
ccaccaguuuucagagggcca

SEQ ID NO: 42673 - RNA, 21 nt, Artificial Sequence
  GATA2 Guide RNA
ccaccccgccacagcguggac

SEQ ID NO: 42674 - RNA, 21 nt, Artificial Sequence
  GATA2 Guide RNA
ccacccugacccuuuuuaagc

SEQ ID NO: 42675 - RNA, 21 nt, Artificial Sequence
  GATA2 Guide RNA
ccaccgcaugccagcacugcc

SEQ ID NO: 42676 - RNA, 21 nt, Artificial Sequence
  GATA2 Guide RNA
ccacgcuguggcgggguggga

SEQ ID NO: 42677 - RNA, 21 nt, Artificial Sequence
  GATA2 Guide RNA
ccagaacccgcccuuccugga

SEQ ID NO: 42678 - RNA, 21 nt, Artificial Sequence
  GATA2 Guide RNA
ccagaggcaggucaagcugag

SEQ ID NO: 42679 - RNA, 21 nt, Artificial Sequence
  GATA2 Guide RNA
ccagauggcuaccauuccagg

SEQ ID NO: 42680 - RNA, 21 nt, Artificial Sequence
  GATA2 Guide RNA
ccagcaacauuccucccaccc

SEQ ID NO: 42681 - RNA, 21 nt, Artificial Sequence
  GATA2 Guide RNA
ccagcacugcccagccaacug

SEQ ID NO: 42682 - RNA, 21 nt, Artificial Sequence
  GATA2 Guide RNA
ccagccaacugaaguccuccc

SEQ ID NO: 42683 - RNA, 21 nt, Artificial Sequence
  GATA2 Guide RNA
ccaggaagccaggaauugugc

SEQ ID NO: 42684 - RNA, 21 nt, Artificial Sequence
  GATA2 Guide RNA
ccaggaagggcggguucuggc

SEQ ID NO: 42685 - RNA, 21 nt, Artificial Sequence
  GATA2 Guide RNA
ccaggaauugugcccgaccuu

SEQ ID NO: 42686 - RNA, 21 nt, Artificial Sequence
  GATA2 Guide RNA
ccagggagggugugggucagc

SEQ ID NO: 42687 - RNA, 21 nt, Artificial Sequence
  GATA2 Guide RNA
ccaguuccuuccuccagcaac

SEQ ID NO: 42688 - RNA, 21 nt, Artificial Sequence
  GATA2 Guide RNA
ccaguuuucagagggccaguu

SEQ ID NO: 42689 - RNA, 21 nt, Artificial Sequence
  GATA2 Guide RNA
ccauaugccagaacccgcccu

SEQ ID NO: 42690 - RNA, 21 nt, Artificial Sequence
  GATA2 Guide RNA
ccaucaccagauggcuaccau

SEQ ID NO: 42691 - RNA, 21 nt, Artificial Sequence
  GATA2 Guide RNA
ccaucuggugaugggacuaug

SEQ ID NO: 42692 - RNA, 21 nt, Artificial Sequence
  GATA2 Guide RNA
ccauuccaggaagggcggguu

SEQ ID NO: 42693 - RNA, 21 nt, Artificial Sequence
  GATA2 Guide RNA
cccacacccucccuggcucug

SEQ ID NO: 42694 - RNA, 21 nt, Artificial Sequence
  GATA2 Guide RNA
cccaccccgccacagcgugga

SEQ ID NO: 42695 - RNA, 21 nt, Artificial Sequence
  GATA2 Guide RNA
cccacccugacccuuuuuaag

SEQ ID NO: 42696 - RNA, 21 nt, Artificial Sequence
  GATA2 Guide RNA
cccaccgcaugccagcacugc

SEQ ID NO: 42697 - RNA, 21 nt, Artificial Sequence
  GATA2 Guide RNA
cccagccaacugaaguccucc

SEQ ID NO: 42698 - RNA, 21 nt, Artificial Sequence
  GATA2 Guide RNA
cccaggaagccaggaauugug

SEQ ID NO: 42699 - RNA, 21 nt, Artificial Sequence
  GATA2 Guide RNA
cccauaugccagaacccgccc

SEQ ID NO: 42700 - RNA, 21 nt, Artificial Sequence
  GATA2 Guide RNA
cccaucaccagauggcuacca

SEQ ID NO: 42701 - RNA, 21 nt, Artificial Sequence
  GATA2 Guide RNA
ccccacccugacccuuuuuaa

SEQ ID NO: 42702 - RNA, 21 nt, Artificial Sequence
  GATA2 Guide RNA
ccccauaugccagaacccgcc

SEQ ID NO: 42703 - RNA, 21 nt, Artificial Sequence
  GATA2 Guide RNA
cccccacccugacccuuuuua

SEQ ID NO: 42704 - RNA, 21 nt, Artificial Sequence
  GATA2 Guide RNA
ccccccacccugacccuuuuu

SEQ ID NO: 42705 - RNA, 21 nt, Artificial Sequence
  GATA2 Guide RNA
ccccgccacagcguggaccag

SEQ ID NO: 42706 - RNA, 21 nt, Artificial Sequence
  GATA2 Guide RNA
cccgaccuucauagucccauc

SEQ ID NO: 42707 - RNA, 21 nt, Artificial Sequence
  GATA2 Guide RNA
cccgccacagcguggaccaga

SEQ ID NO: 42708 - RNA, 21 nt, Artificial Sequence
  GATA2 Guide RNA
cccgcccuuccuggaauggua

SEQ ID NO: 42709 - RNA, 21 nt, Artificial Sequence
  GATA2 Guide RNA
cccucagcuugaccugccucu

SEQ ID NO: 42710 - RNA, 21 nt, Artificial Sequence
  GATA2 Guide RNA
cccucccuggcucugcccacc

SEQ ID NO: 42711 - RNA, 21 nt, Artificial Sequence
  GATA2 Guide RNA
cccucugaaaacuggugguug

SEQ ID NO: 42712 - RNA, 21 nt, Artificial Sequence
  GATA2 Guide RNA
cccugacccuuuuuaagcaga

SEQ ID NO: 42713 - RNA, 21 nt, Artificial Sequence
  GATA2 Guide RNA
cccuggcucugcccaccgcau

SEQ ID NO: 42714 - RNA, 21 nt, Artificial Sequence
  GATA2 Guide RNA
cccuuccuggaaugguagcca

SEQ ID NO: 42715 - RNA, 21 nt, Artificial Sequence
  GATA2 Guide RNA
cccuuuuuaagcagagaaacc

SEQ ID NO: 42716 - RNA, 21 nt, Artificial Sequence
  GATA2 Guide RNA
ccgaccuucauagucccauca

SEQ ID NO: 42717 - RNA, 21 nt, Artificial Sequence
  GATA2 Guide RNA
ccgcaugccagcacugcccag

SEQ ID NO: 42718 - RNA, 21 nt, Artificial Sequence
  GATA2 Guide RNA
ccgccacagcguggaccagag

SEQ ID NO: 42719 - RNA, 21 nt, Artificial Sequence
  GATA2 Guide RNA
ccgcccuuccuggaaugguag

SEQ ID NO: 42720 - RNA, 21 nt, Artificial Sequence
  GATA2 Guide RNA
ccuagaggcaaccaccaguuu

SEQ ID NO: 42721 - RNA, 21 nt, Artificial Sequence
  GATA2 Guide RNA
ccucagcuugaccugccucug

SEQ ID NO: 42722 - RNA, 21 nt, Artificial Sequence
  GATA2 Guide RNA
ccuccagcaacauuccuccca

SEQ ID NO: 42723 - RNA, 21 nt, Artificial Sequence
  GATA2 Guide RNA
ccucccaccccgccacagcgu

SEQ ID NO: 42724 - RNA, 21 nt, Artificial Sequence
  GATA2 Guide RNA
ccucccuggcucugcccaccg

SEQ ID NO: 42725 - RNA, 21 nt, Artificial Sequence
  GATA2 Guide RNA
ccucugaaaacuggugguugc

SEQ ID NO: 42726 - RNA, 21 nt, Artificial Sequence
  GATA2 Guide RNA
ccucugguccacgcuguggcg

SEQ ID NO: 42727 - RNA, 21 nt, Artificial Sequence
  GATA2 Guide RNA
ccugacccuuuuuaagcagag

SEQ ID NO: 42728 - RNA, 21 nt, Artificial Sequence
  GATA2 Guide RNA
ccugccucugguccacgcugu

SEQ ID NO: 42729 - RNA, 21 nt, Artificial Sequence
  GATA2 Guide RNA
ccuggaaugguagccaucugg

SEQ ID NO: 42730 - RNA, 21 nt, Artificial Sequence
  GATA2 Guide RNA
ccuggcucugcccaccgcaug

SEQ ID NO: 42731 - RNA, 21 nt, Artificial Sequence
  GATA2 Guide RNA
ccuggcuuccugggacccuca

SEQ ID NO: 42732 - RNA, 21 nt, Artificial Sequence
  GATA2 Guide RNA
ccugggacccucagcuugacc

SEQ ID NO: 42733 - RNA, 21 nt, Artificial Sequence
  GATA2 Guide RNA
ccuucauagucccaucaccag

SEQ ID NO: 42734 - RNA, 21 nt, Artificial Sequence
  GATA2 Guide RNA
ccuuccuccagcaacauuccu

SEQ ID NO: 42735 - RNA, 21 nt, Artificial Sequence
  GATA2 Guide RNA
ccuuccuggaaugguagccau

SEQ ID NO: 42736 - RNA, 21 nt, Artificial Sequence
  GATA2 Guide RNA
ccuuuuuaagcagagaaacca

SEQ ID NO: 42737 - RNA, 21 nt, Artificial Sequence
  GATA2 Guide RNA
cgaccuucauagucccaucac

SEQ ID NO: 42738 - RNA, 21 nt, Artificial Sequence
  GATA2 Guide RNA
cgcaugccagcacugcccagc

SEQ ID NO: 42739 - RNA, 21 nt, Artificial Sequence
  GATA2 Guide RNA
cgccacagcguggaccagagg

SEQ ID NO: 42740 - RNA, 21 nt, Artificial Sequence
  GATA2 Guide RNA
cgcccuuccuggaaugguagc

SEQ ID NO: 42741 - RNA, 21 nt, Artificial Sequence
  GATA2 Guide RNA
cgcuguggcggggugggagga

SEQ ID NO: 42742 - RNA, 21 nt, Artificial Sequence
  GATA2 Guide RNA
cgggcacaauuccuggcuucc

SEQ ID NO: 42743 - RNA, 21 nt, Artificial Sequence
  GATA2 Guide RNA
cggggugggaggaauguugcu

SEQ ID NO: 42744 - RNA, 21 nt, Artificial Sequence
  GATA2 Guide RNA
cggguucuggcauauggggcu

SEQ ID NO: 42745 - RNA, 21 nt, Artificial Sequence
  GATA2 Guide RNA
cggugggcagagccagggagg

SEQ ID NO: 42746 - RNA, 21 nt, Artificial Sequence
  GATA2 Guide RNA
cguggaccagaggcaggucaa

SEQ ID NO: 42747 - RNA, 21 nt, Artificial Sequence
  GATA2 Guide RNA
cuaccauuccaggaagggcgg

SEQ ID NO: 42748 - RNA, 21 nt, Artificial Sequence
  GATA2 Guide RNA
cuagaggcaaccaccaguuuu

SEQ ID NO: 42749 - RNA, 21 nt, Artificial Sequence
  GATA2 Guide RNA
cuagggaagugguuucucugc

SEQ ID NO: 42750 - RNA, 21 nt, Artificial Sequence
  GATA2 Guide RNA
cuaugaaggucgggcacaauu

SEQ ID NO: 42751 - RNA, 21 nt, Artificial Sequence
  GATA2 Guide RNA
cucagcuugaccugccucugg

SEQ ID NO: 42752 - RNA, 21 nt, Artificial Sequence
  GATA2 Guide RNA
cuccagcaacauuccucccac

SEQ ID NO: 42753 - RNA, 21 nt, Artificial Sequence
  GATA2 Guide RNA
cucccaccccgccacagcgug

SEQ ID NO: 42754 - RNA, 21 nt, Artificial Sequence
  GATA2 Guide RNA
cucccuggcucugcccaccgc

SEQ ID NO: 42755 - RNA, 21 nt, Artificial Sequence
  GATA2 Guide RNA
cucugaaaacuggugguugcc

SEQ ID NO: 42756 - RNA, 21 nt, Artificial Sequence
  GATA2 Guide RNA
cucugcccaccgcaugccagc

SEQ ID NO: 42757 - RNA, 21 nt, Artificial Sequence
  GATA2 Guide RNA
cucugcuuaaaaagggucagg

SEQ ID NO: 42758 - RNA, 21 nt, Artificial Sequence
  GATA2 Guide RNA
cucugguccacgcuguggcgg

SEQ ID NO: 42759 - RNA, 21 nt, Artificial Sequence
  GATA2 Guide RNA
cugacccacacccucccuggc

SEQ ID NO: 42760 - RNA, 21 nt, Artificial Sequence
  GATA2 Guide RNA
cugacccuuuuuaagcagaga

SEQ ID NO: 42761 - RNA, 21 nt, Artificial Sequence
  GATA2 Guide RNA
cugagggucccaggaagccag

SEQ ID NO: 42762 - RNA, 21 nt, Artificial Sequence
  GATA2 Guide RNA
cugcccaccgcaugccagcac

SEQ ID NO: 42763 - RNA, 21 nt, Artificial Sequence
  GATA2 Guide RNA
cugcccagccaacugaagucc

SEQ ID NO: 42764 - RNA, 21 nt, Artificial Sequence
  GATA2 Guide RNA
cugccucugguccacgcugug

SEQ ID NO: 42765 - RNA, 21 nt, Artificial Sequence
  GATA2 Guide RNA
cugcuuaaaaagggucagggu

SEQ ID NO: 42766 - RNA, 21 nt, Artificial Sequence
  GATA2 Guide RNA
cuggaaugguagccaucuggu

SEQ ID NO: 42767 - RNA, 21 nt, Artificial Sequence
  GATA2 Guide RNA
cuggaggaaggaacuggcccu

SEQ ID NO: 42768 - RNA, 21 nt, Artificial Sequence
  GATA2 Guide RNA
cuggcauauggggcugaccca

SEQ ID NO: 42769 - RNA, 21 nt, Artificial Sequence
  GATA2 Guide RNA
cuggcaugcggugggcagagc

SEQ ID NO: 42770 - RNA, 21 nt, Artificial Sequence
  GATA2 Guide RNA
cuggcccucugaaaacuggug

SEQ ID NO: 42771 - RNA, 21 nt, Artificial Sequence
  GATA2 Guide RNA
cuggcucugcccaccgcaugc

SEQ ID NO: 42772 - RNA, 21 nt, Artificial Sequence
  GATA2 Guide RNA
cuggcuuccugggacccucag

SEQ ID NO: 42773 - RNA, 21 nt, Artificial Sequence
  GATA2 Guide RNA
cugggacccucagcuugaccu

SEQ ID NO: 42774 - RNA, 21 nt, Artificial Sequence
  GATA2 Guide RNA
cugggcagugcuggcaugcgg

SEQ ID NO: 42775 - RNA, 21 nt, Artificial Sequence
  GATA2 Guide RNA
cugguccacgcuguggcgggg

SEQ ID NO: 42776 - RNA, 21 nt, Artificial Sequence
  GATA2 Guide RNA
cuggugaugggacuaugaagg

SEQ ID NO: 42777 - RNA, 21 nt, Artificial Sequence
  GATA2 Guide RNA
cuguggcggggugggaggaau

SEQ ID NO: 42778 - RNA, 21 nt, Artificial Sequence
  GATA2 Guide RNA
cuuaaaaagggucaggguggg

SEQ ID NO: 42779 - RNA, 21 nt, Artificial Sequence
  GATA2 Guide RNA
cuucaguuggcugggcagugc

SEQ ID NO: 42780 - RNA, 21 nt, Artificial Sequence
  GATA2 Guide RNA
cuucauagucccaucaccaga

SEQ ID NO: 42781 - RNA, 21 nt, Artificial Sequence
  GATA2 Guide RNA
cuuccuccagcaacauuccuc

SEQ ID NO: 42782 - RNA, 21 nt, Artificial Sequence
  GATA2 Guide RNA
cuuccuggaaugguagccauc

SEQ ID NO: 42783 - RNA, 21 nt, Artificial Sequence
  GATA2 Guide RNA
cuuccugggacccucagcuug

SEQ ID NO: 42784 - RNA, 21 nt, Artificial Sequence
  GATA2 Guide RNA
cuugaccugccucugguccac

SEQ ID NO: 42785 - RNA, 21 nt, Artificial Sequence
  GATA2 Guide RNA
cuuuuuaagcagagaaaccac

SEQ ID NO: 42786 - RNA, 21 nt, Artificial Sequence
  GATA2 Guide RNA
gaacccgcccuuccuggaaug

SEQ ID NO: 42787 - RNA, 21 nt, Artificial Sequence
  GATA2 Guide RNA
gaacuggcccucugaaaacug

SEQ ID NO: 42788 - RNA, 21 nt, Artificial Sequence
  GATA2 Guide RNA
gaagccaggaauugugcccga

SEQ ID NO: 42789 - RNA, 21 nt, Artificial Sequence
  GATA2 Guide RNA
gaaggaacuggcccucugaaa

SEQ ID NO: 42790 - RNA, 21 nt, Artificial Sequence
  GATA2 Guide RNA
gaagggcggguucuggcauau

SEQ ID NO: 42791 - RNA, 21 nt, Artificial Sequence
  GATA2 Guide RNA
gaaggucgggcacaauuccug

SEQ ID NO: 42792 - RNA, 21 nt, Artificial Sequence
  GATA2 Guide RNA
gaagugguuucucugcuuaaa

SEQ ID NO: 42793 - RNA, 21 nt, Artificial Sequence
  GATA2 Guide RNA
gaaugguagccaucuggugau

SEQ ID NO: 42794 - RNA, 21 nt, Artificial Sequence
  GATA2 Guide RNA
gaauguugcuggaggaaggaa

SEQ ID NO: 42795 - RNA, 21 nt, Artificial Sequence
  GATA2 Guide RNA
gaauugugcccgaccuucaua

SEQ ID NO: 42796 - RNA, 21 nt, Artificial Sequence
  GATA2 Guide RNA
gaccagaggcaggucaagcug

SEQ ID NO: 42797 - RNA, 21 nt, Artificial Sequence
  GATA2 Guide RNA
gacccacacccucccuggcuc

SEQ ID NO: 42798 - RNA, 21 nt, Artificial Sequence
  GATA2 Guide RNA
gacccucagcuugaccugccu

SEQ ID NO: 42799 - RNA, 21 nt, Artificial Sequence
  GATA2 Guide RNA
gacccuuuuuaagcagagaaa

SEQ ID NO: 42800 - RNA, 21 nt, Artificial Sequence
  GATA2 Guide RNA
gaccugccucugguccacgcu

SEQ ID NO: 42801 - RNA, 21 nt, Artificial Sequence
  GATA2 Guide RNA
gaccuucauagucccaucacc

SEQ ID NO: 42802 - RNA, 21 nt, Artificial Sequence
  GATA2 Guide RNA
gacuaugaaggucgggcacaa

SEQ ID NO: 42803 - RNA, 21 nt, Artificial Sequence
  GATA2 Guide RNA
gacuucaguuggcugggcagu

SEQ ID NO: 42804 - RNA, 21 nt, Artificial Sequence
  GATA2 Guide RNA
gagccagggaggguguggguc

SEQ ID NO: 42805 - RNA, 21 nt, Artificial Sequence
  GATA2 Guide RNA
gaggaaggaacuggcccucug

SEQ ID NO: 42806 - RNA, 21 nt, Artificial Sequence
  GATA2 Guide RNA
gaggaauguugcuggaggaag

SEQ ID NO: 42807 - RNA, 21 nt, Artificial Sequence
  GATA2 Guide RNA
gaggacuucaguuggcugggc

SEQ ID NO: 42808 - RNA, 21 nt, Artificial Sequence
  GATA2 Guide RNA
gaggcaaccaccaguuuucag

SEQ ID NO: 42809 - RNA, 21 nt, Artificial Sequence
  GATA2 Guide RNA
gaggcaggucaagcugagggu

SEQ ID NO: 42810 - RNA, 21 nt, Artificial Sequence
  GATA2 Guide RNA
gagggccaguuccuuccucca

SEQ ID NO: 42811 - RNA, 21 nt, Artificial Sequence
  GATA2 Guide RNA
gagggucccaggaagccagga

SEQ ID NO: 42812 - RNA, 21 nt, Artificial Sequence
  GATA2 Guide RNA
gagggugugggucagccccau

SEQ ID NO: 42813 - RNA, 21 nt, Artificial Sequence
  GATA2 Guide RNA
gauggcuaccauuccaggaag

SEQ ID NO: 42814 - RNA, 21 nt, Artificial Sequence
  GATA2 Guide RNA
gaugggacuaugaaggucggg

SEQ ID NO: 42815 - RNA, 21 nt, Artificial Sequence
  GATA2 Guide RNA
gcaacauuccucccaccccgc

SEQ ID NO: 42816 - RNA, 21 nt, Artificial Sequence
  GATA2 Guide RNA
gcaaccaccaguuuucagagg

SEQ ID NO: 42817 - RNA, 21 nt, Artificial Sequence
  GATA2 Guide RNA
gcacaauuccuggcuuccugg

SEQ ID NO: 42818 - RNA, 21 nt, Artificial Sequence
  GATA2 Guide RNA
gcacugcccagccaacugaag

SEQ ID NO: 42819 - RNA, 21 nt, Artificial Sequence
  GATA2 Guide RNA
gcagagccagggagggugugg

SEQ ID NO: 42820 - RNA, 21 nt, Artificial Sequence
  GATA2 Guide RNA
gcaggucaagcugaggguccc

SEQ ID NO: 42821 - RNA, 21 nt, Artificial Sequence
  GATA2 Guide RNA
gcagugcuggcaugcgguggg

SEQ ID NO: 42822 - RNA, 21 nt, Artificial Sequence
  GATA2 Guide RNA
gcauauggggcugacccacac

SEQ ID NO: 42823 - RNA, 21 nt, Artificial Sequence
  GATA2 Guide RNA
gcaugccagcacugcccagcc

SEQ ID NO: 42824 - RNA, 21 nt, Artificial Sequence
  GATA2 Guide RNA
gcaugcggugggcagagccag

SEQ ID NO: 42825 - RNA, 21 nt, Artificial Sequence
  GATA2 Guide RNA
gccaacugaaguccucccccc

SEQ ID NO: 42826 - RNA, 21 nt, Artificial Sequence
  GATA2 Guide RNA
gccacagcguggaccagaggc

SEQ ID NO: 42827 - RNA, 21 nt, Artificial Sequence
  GATA2 Guide RNA
gccagaacccgcccuuccugg

SEQ ID NO: 42828 - RNA, 21 nt, Artificial Sequence
  GATA2 Guide RNA
gccagcacugcccagccaacu

SEQ ID NO: 42829 - RNA, 21 nt, Artificial Sequence
  GATA2 Guide RNA
gccaggaauugugcccgaccu

SEQ ID NO: 42830 - RNA, 21 nt, Artificial Sequence
  GATA2 Guide RNA
gccagggagggugugggucag

SEQ ID NO: 42831 - RNA, 21 nt, Artificial Sequence
  GATA2 Guide RNA
gccaguuccuuccuccagcaa

SEQ ID NO: 42832 - RNA, 21 nt, Artificial Sequence
  GATA2 Guide RNA
gccaucuggugaugggacuau

SEQ ID NO: 42833 - RNA, 21 nt, Artificial Sequence
  GATA2 Guide RNA
gcccaccgcaugccagcacug

SEQ ID NO: 42834 - RNA, 21 nt, Artificial Sequence
  GATA2 Guide RNA
gcccagccaacugaaguccuc

SEQ ID NO: 42835 - RNA, 21 nt, Artificial Sequence
  GATA2 Guide RNA
gccccauaugccagaacccgc

SEQ ID NO: 42836 - RNA, 21 nt, Artificial Sequence
  GATA2 Guide RNA
gcccgaccuucauagucccau

SEQ ID NO: 42837 - RNA, 21 nt, Artificial Sequence
  GATA2 Guide RNA
gcccucugaaaacuggugguu

SEQ ID NO: 42838 - RNA, 21 nt, Artificial Sequence
  GATA2 Guide RNA
gcccuuccuggaaugguagcc

SEQ ID NO: 42839 - RNA, 21 nt, Artificial Sequence
  GATA2 Guide RNA
gccucugguccacgcuguggc

SEQ ID NO: 42840 - RNA, 21 nt, Artificial Sequence
  GATA2 Guide RNA
gcggggugggaggaauguugc

SEQ ID NO: 42841 - RNA, 21 nt, Artificial Sequence
  GATA2 Guide RNA
gcggguucuggcauauggggc

SEQ ID NO: 42842 - RNA, 21 nt, Artificial Sequence
  GATA2 Guide RNA
gcggugggcagagccagggag

SEQ ID NO: 42843 - RNA, 21 nt, Artificial Sequence
  GATA2 Guide RNA
gcguggaccagaggcagguca

SEQ ID NO: 42844 - RNA, 21 nt, Artificial Sequence
  GATA2 Guide RNA
gcuaccauuccaggaagggcg

SEQ ID NO: 42845 - RNA, 21 nt, Artificial Sequence
  GATA2 Guide RNA
gcucugcccaccgcaugccag

SEQ ID NO: 42846 - RNA, 21 nt, Artificial Sequence
  GATA2 Guide RNA
gcugacccacacccucccugg

SEQ ID NO: 42847 - RNA, 21 nt, Artificial Sequence
  GATA2 Guide RNA
gcugagggucccaggaagcca

SEQ ID NO: 42848 - RNA, 21 nt, Artificial Sequence
  GATA2 Guide RNA
gcuggaggaaggaacuggccc

SEQ ID NO: 42849 - RNA, 21 nt, Artificial Sequence
  GATA2 Guide RNA
gcuggcaugcggugggcagag

SEQ ID NO: 42850 - RNA, 21 nt, Artificial Sequence
  GATA2 Guide RNA
gcugggcagugcuggcaugcg

SEQ ID NO: 42851 - RNA, 21 nt, Artificial Sequence
  GATA2 Guide RNA
gcuguggcggggugggaggaa

SEQ ID NO: 42852 - RNA, 21 nt, Artificial Sequence
  GATA2 Guide RNA
gcuuaaaaagggucagggugg

SEQ ID NO: 42853 - RNA, 21 nt, Artificial Sequence
  GATA2 Guide RNA
gcuuccugggacccucagcuu

SEQ ID NO: 42854 - RNA, 21 nt, Artificial Sequence
  GATA2 Guide RNA
gcuugaccugccucuggucca

SEQ ID NO: 42855 - RNA, 21 nt, Artificial Sequence
  GATA2 Guide RNA
ggaacuggcccucugaaaacu

SEQ ID NO: 42856 - RNA, 21 nt, Artificial Sequence
  GATA2 Guide RNA
ggaagccaggaauugugcccg

SEQ ID NO: 42857 - RNA, 21 nt, Artificial Sequence
  GATA2 Guide RNA
ggaaggaacuggcccucugaa

SEQ ID NO: 42858 - RNA, 21 nt, Artificial Sequence
  GATA2 Guide RNA
ggaagggcggguucuggcaua

SEQ ID NO: 42859 - RNA, 21 nt, Artificial Sequence
  GATA2 Guide RNA
ggaagugguuucucugcuuaa

SEQ ID NO: 42860 - RNA, 21 nt, Artificial Sequence
  GATA2 Guide RNA
ggaaugguagccaucugguga

SEQ ID NO: 42861 - RNA, 21 nt, Artificial Sequence
  GATA2 Guide RNA
ggaauguugcuggaggaagga

SEQ ID NO: 42862 - RNA, 21 nt, Artificial Sequence
  GATA2 Guide RNA
ggaauugugcccgaccuucau

SEQ ID NO: 42863 - RNA, 21 nt, Artificial Sequence
  GATA2 Guide RNA
ggaccagaggcaggucaagcu

SEQ ID NO: 42864 - RNA, 21 nt, Artificial Sequence
  GATA2 Guide RNA
ggacccucagcuugaccugcc

SEQ ID NO: 42865 - RNA, 21 nt, Artificial Sequence
  GATA2 Guide RNA
ggacuaugaaggucgggcaca

SEQ ID NO: 42866 - RNA, 21 nt, Artificial Sequence
  GATA2 Guide RNA
ggacuucaguuggcugggcag

SEQ ID NO: 42867 - RNA, 21 nt, Artificial Sequence
  GATA2 Guide RNA
ggaggaaggaacuggcccucu

SEQ ID NO: 42868 - RNA, 21 nt, Artificial Sequence
  GATA2 Guide RNA
ggaggaauguugcuggaggaa

SEQ ID NO: 42869 - RNA, 21 nt, Artificial Sequence
  GATA2 Guide RNA
ggaggacuucaguuggcuggg

SEQ ID NO: 42870 - RNA, 21 nt, Artificial Sequence
  GATA2 Guide RNA
ggagggugugggucagcccca

SEQ ID NO: 42871 - RNA, 21 nt, Artificial Sequence
  GATA2 Guide RNA
ggcaaccaccaguuuucagag

SEQ ID NO: 42872 - RNA, 21 nt, Artificial Sequence
  GATA2 Guide RNA
ggcacaauuccuggcuuccug

SEQ ID NO: 42873 - RNA, 21 nt, Artificial Sequence
  GATA2 Guide RNA
ggcagagccagggagggugug

SEQ ID NO: 42874 - RNA, 21 nt, Artificial Sequence
  GATA2 Guide RNA
ggcaggucaagcugagggucc

SEQ ID NO: 42875 - RNA, 21 nt, Artificial Sequence
  GATA2 Guide RNA
ggcagugcuggcaugcggugg

SEQ ID NO: 42876 - RNA, 21 nt, Artificial Sequence
  GATA2 Guide RNA
ggcauauggggcugacccaca

SEQ ID NO: 42877 - RNA, 21 nt, Artificial Sequence
  GATA2 Guide RNA
ggcaugcggugggcagagcca

SEQ ID NO: 42878 - RNA, 21 nt, Artificial Sequence
  GATA2 Guide RNA
ggccaguuccuuccuccagca

SEQ ID NO: 42879 - RNA, 21 nt, Artificial Sequence
  GATA2 Guide RNA
ggcccucugaaaacugguggu

SEQ ID NO: 42880 - RNA, 21 nt, Artificial Sequence
  GATA2 Guide RNA
ggcggggugggaggaauguug

SEQ ID NO: 42881 - RNA, 21 nt, Artificial Sequence
  GATA2 Guide RNA
ggcggguucuggcauaugggg

SEQ ID NO: 42882 - RNA, 21 nt, Artificial Sequence
  GATA2 Guide RNA
ggcuaccauuccaggaagggc

SEQ ID NO: 42883 - RNA, 21 nt, Artificial Sequence
  GATA2 Guide RNA
ggcucugcccaccgcaugcca

SEQ ID NO: 42884 - RNA, 21 nt, Artificial Sequence
  GATA2 Guide RNA
ggcugacccacacccucccug

SEQ ID NO: 42885 - RNA, 21 nt, Artificial Sequence
  GATA2 Guide RNA
ggcugggcagugcuggcaugc

SEQ ID NO: 42886 - RNA, 21 nt, Artificial Sequence
  GATA2 Guide RNA
ggcuuccugggacccucagcu

SEQ ID NO: 42887 - RNA, 21 nt, Artificial Sequence
  GATA2 Guide RNA
gggaagugguuucucugcuua

SEQ ID NO: 42888 - RNA, 21 nt, Artificial Sequence
  GATA2 Guide RNA
gggacccucagcuugaccugc

SEQ ID NO: 42889 - RNA, 21 nt, Artificial Sequence
  GATA2 Guide RNA
gggacuaugaaggucgggcac

SEQ ID NO: 42890 - RNA, 21 nt, Artificial Sequence
  GATA2 Guide RNA
gggaggaauguugcuggagga

SEQ ID NO: 42891 - RNA, 21 nt, Artificial Sequence
  GATA2 Guide RNA
gggaggacuucaguuggcugg

SEQ ID NO: 42892 - RNA, 21 nt, Artificial Sequence
  GATA2 Guide RNA
gggagggugugggucagcccc

SEQ ID NO: 42893 - RNA, 21 nt, Artificial Sequence
  GATA2 Guide RNA
gggcacaauuccuggcuuccu

SEQ ID NO: 42894 - RNA, 21 nt, Artificial Sequence
  GATA2 Guide RNA
gggcagagccagggagggugu

SEQ ID NO: 42895 - RNA, 21 nt, Artificial Sequence
  GATA2 Guide RNA
gggcagugcuggcaugcggug

SEQ ID NO: 42896 - RNA, 21 nt, Artificial Sequence
  GATA2 Guide RNA
gggccaguuccuuccuccagc

SEQ ID NO: 42897 - RNA, 21 nt, Artificial Sequence
  GATA2 Guide RNA
gggcggguucuggcauauggg

SEQ ID NO: 42898 - RNA, 21 nt, Artificial Sequence
  GATA2 Guide RNA
gggcugacccacacccucccu

SEQ ID NO: 42899 - RNA, 21 nt, Artificial Sequence
  GATA2 Guide RNA
ggggaggacuucaguuggcug

SEQ ID NO: 42900 - RNA, 21 nt, Artificial Sequence
  GATA2 Guide RNA
ggggcugacccacacccuccc

SEQ ID NO: 42901 - RNA, 21 nt, Artificial Sequence
  GATA2 Guide RNA
gggggaggacuucaguuggcu

SEQ ID NO: 42902 - RNA, 21 nt, Artificial Sequence
  GATA2 Guide RNA
ggggggaggacuucaguuggc

SEQ ID NO: 42903 - RNA, 21 nt, Artificial Sequence
  GATA2 Guide RNA
ggggugggaggaauguugcug

SEQ ID NO: 42904 - RNA, 21 nt, Artificial Sequence
  GATA2 Guide RNA
gggucagccccauaugccaga

SEQ ID NO: 42905 - RNA, 21 nt, Artificial Sequence
  GATA2 Guide RNA
gggucccaggaagccaggaau

SEQ ID NO: 42906 - RNA, 21 nt, Artificial Sequence
  GATA2 Guide RNA
gggugggaggaauguugcugg

SEQ ID NO: 42907 - RNA, 21 nt, Artificial Sequence
  GATA2 Guide RNA
gggugugggucagccccauau

SEQ ID NO: 42908 - RNA, 21 nt, Artificial Sequence
  GATA2 Guide RNA
ggguucuggcauauggggcug

SEQ ID NO: 42909 - RNA, 21 nt, Artificial Sequence
  GATA2 Guide RNA
gguagccaucuggugauggga

SEQ ID NO: 42910 - RNA, 21 nt, Artificial Sequence
  GATA2 Guide RNA
ggucaagcugagggucccagg

SEQ ID NO: 42911 - RNA, 21 nt, Artificial Sequence
  GATA2 Guide RNA
ggucagccccauaugccagaa

SEQ ID NO: 42912 - RNA, 21 nt, Artificial Sequence
  GATA2 Guide RNA
gguccacgcuguggcggggug

SEQ ID NO: 42913 - RNA, 21 nt, Artificial Sequence
  GATA2 Guide RNA
ggucccaggaagccaggaauu

SEQ ID NO: 42914 - RNA, 21 nt, Artificial Sequence
  GATA2 Guide RNA
ggucgggcacaauuccuggcu

SEQ ID NO: 42915 - RNA, 21 nt, Artificial Sequence
  GATA2 Guide RNA
ggugaugggacuaugaagguc

SEQ ID NO: 42916 - RNA, 21 nt, Artificial Sequence
  GATA2 Guide RNA
ggugggaggaauguugcugga

SEQ ID NO: 42917 - RNA, 21 nt, Artificial Sequence
  GATA2 Guide RNA
ggugggcagagccagggaggg

SEQ ID NO: 42918 - RNA, 21 nt, Artificial Sequence
  GATA2 Guide RNA
ggugugggucagccccauaug

SEQ ID NO: 42919 - RNA, 21 nt, Artificial Sequence
  GATA2 Guide RNA
gguucuggcauauggggcuga

SEQ ID NO: 42920 - RNA, 21 nt, Artificial Sequence
  GATA2 Guide RNA
gguuucucugcuuaaaaaggg

SEQ ID NO: 42921 - RNA, 21 nt, Artificial Sequence
  GATA2 Guide RNA
guagccaucuggugaugggac

SEQ ID NO: 42922 - RNA, 21 nt, Artificial Sequence
  GATA2 Guide RNA
gucaagcugagggucccagga

SEQ ID NO: 42923 - RNA, 21 nt, Artificial Sequence
  GATA2 Guide RNA
gucagccccauaugccagaac

SEQ ID NO: 42924 - RNA, 21 nt, Artificial Sequence
  GATA2 Guide RNA
guccacgcuguggcggggugg

SEQ ID NO: 42925 - RNA, 21 nt, Artificial Sequence
  GATA2 Guide RNA
gucccaggaagccaggaauug

SEQ ID NO: 42926 - RNA, 21 nt, Artificial Sequence
  GATA2 Guide RNA
gucccaucaccagauggcuac

SEQ ID NO: 42927 - RNA, 21 nt, Artificial Sequence
  GATA2 Guide RNA
gucgggcacaauuccuggcuu

SEQ ID NO: 42928 - RNA, 21 nt, Artificial Sequence
  GATA2 Guide RNA
gugaugggacuaugaaggucg

SEQ ID NO: 42929 - RNA, 21 nt, Artificial Sequence
  GATA2 Guide RNA
gugcccgaccuucauaguccc

SEQ ID NO: 42930 - RNA, 21 nt, Artificial Sequence
  GATA2 Guide RNA
gugcuggcaugcggugggcag

SEQ ID NO: 42931 - RNA, 21 nt, Artificial Sequence
  GATA2 Guide RNA
guggaccagaggcaggucaag

SEQ ID NO: 42932 - RNA, 21 nt, Artificial Sequence
  GATA2 Guide RNA
guggcggggugggaggaaugu

SEQ ID NO: 42933 - RNA, 21 nt, Artificial Sequence
  GATA2 Guide RNA
gugggaggaauguugcuggag

SEQ ID NO: 42934 - RNA, 21 nt, Artificial Sequence
  GATA2 Guide RNA
gugggcagagccagggagggu

SEQ ID NO: 42935 - RNA, 21 nt, Artificial Sequence
  GATA2 Guide RNA
gugggucagccccauaugcca

SEQ ID NO: 42936 - RNA, 21 nt, Artificial Sequence
  GATA2 Guide RNA
gugguuucucugcuuaaaaag

SEQ ID NO: 42937 - RNA, 21 nt, Artificial Sequence
  GATA2 Guide RNA
gugugggucagccccauaugc

SEQ ID NO: 42938 - RNA, 21 nt, Artificial Sequence
  GATA2 Guide RNA
guuccuuccuccagcaacauu

SEQ ID NO: 42939 - RNA, 21 nt, Artificial Sequence
  GATA2 Guide RNA
guucuggcauauggggcugac

SEQ ID NO: 42940 - RNA, 21 nt, Artificial Sequence
  GATA2 Guide RNA
guugcuggaggaaggaacugg

SEQ ID NO: 42941 - RNA, 21 nt, Artificial Sequence
  GATA2 Guide RNA
guuggcugggcagugcuggca

SEQ ID NO: 42942 - RNA, 21 nt, Artificial Sequence
  GATA2 Guide RNA
guuucucugcuuaaaaagggu

SEQ ID NO: 42943 - RNA, 21 nt, Artificial Sequence
  GATA2 Guide RNA
guuuucagagggccaguuccu

SEQ ID NO: 42944 - RNA, 21 nt, Artificial Sequence
  GATA2 Guide RNA
uaaaaagggucaggguggggg

SEQ ID NO: 42945 - RNA, 21 nt, Artificial Sequence
  GATA2 Guide RNA
uaagcagagaaaccacuuccc

SEQ ID NO: 42946 - RNA, 21 nt, Artificial Sequence
  GATA2 Guide RNA
uaccauuccaggaagggcggg

SEQ ID NO: 42947 - RNA, 21 nt, Artificial Sequence
  GATA2 Guide RNA
uagaggcaaccaccaguuuuc

SEQ ID NO: 42948 - RNA, 21 nt, Artificial Sequence
  GATA2 Guide RNA
uagccaucuggugaugggacu

SEQ ID NO: 42949 - RNA, 21 nt, Artificial Sequence
  GATA2 Guide RNA
uagggaagugguuucucugcu

SEQ ID NO: 42950 - RNA, 21 nt, Artificial Sequence
  GATA2 Guide RNA
uagucccaucaccagauggcu

SEQ ID NO: 42951 - RNA, 21 nt, Artificial Sequence
  GATA2 Guide RNA
uaugaaggucgggcacaauuc

SEQ ID NO: 42952 - RNA, 21 nt, Artificial Sequence
  GATA2 Guide RNA
uaugccagaacccgcccuucc

SEQ ID NO: 42953 - RNA, 21 nt, Artificial Sequence
  GATA2 Guide RNA
uauggggcugacccacacccu

SEQ ID NO: 42954 - RNA, 21 nt, Artificial Sequence
  GATA2 Guide RNA
ucaagcugagggucccaggaa

SEQ ID NO: 42955 - RNA, 21 nt, Artificial Sequence
  GATA2 Guide RNA
ucaccagauggcuaccauucc

SEQ ID NO: 42956 - RNA, 21 nt, Artificial Sequence
  GATA2 Guide RNA
ucagagggccaguuccuuccu

SEQ ID NO: 42957 - RNA, 21 nt, Artificial Sequence
  GATA2 Guide RNA
ucagccccauaugccagaacc

SEQ ID NO: 42958 - RNA, 21 nt, Artificial Sequence
  GATA2 Guide RNA
ucagcuugaccugccucuggu

SEQ ID NO: 42959 - RNA, 21 nt, Artificial Sequence
  GATA2 Guide RNA
ucaguuggcugggcagugcug

SEQ ID NO: 42960 - RNA, 21 nt, Artificial Sequence
  GATA2 Guide RNA
ucauagucccaucaccagaug

SEQ ID NO: 42961 - RNA, 21 nt, Artificial Sequence
  GATA2 Guide RNA
uccacgcuguggcgggguggg

SEQ ID NO: 42962 - RNA, 21 nt, Artificial Sequence
  GATA2 Guide RNA
uccagcaacauuccucccacc

SEQ ID NO: 42963 - RNA, 21 nt, Artificial Sequence
  GATA2 Guide RNA
uccaggaagggcggguucugg

SEQ ID NO: 42964 - RNA, 21 nt, Artificial Sequence
  GATA2 Guide RNA
ucccaccccgccacagcgugg

SEQ ID NO: 42965 - RNA, 21 nt, Artificial Sequence
  GATA2 Guide RNA
ucccaggaagccaggaauugu

SEQ ID NO: 42966 - RNA, 21 nt, Artificial Sequence
  GATA2 Guide RNA
ucccaucaccagauggcuacc

SEQ ID NO: 42967 - RNA, 21 nt, Artificial Sequence
  GATA2 Guide RNA
ucccuggcucugcccaccgca

SEQ ID NO: 42968 - RNA, 21 nt, Artificial Sequence
  GATA2 Guide RNA
uccuccagcaacauuccuccc

SEQ ID NO: 42969 - RNA, 21 nt, Artificial Sequence
  GATA2 Guide RNA
uccucccaccccgccacagcg

SEQ ID NO: 42970 - RNA, 21 nt, Artificial Sequence
  GATA2 Guide RNA
uccuggaaugguagccaucug

SEQ ID NO: 42971 - RNA, 21 nt, Artificial Sequence
  GATA2 Guide RNA
uccuggcuuccugggacccuc

SEQ ID NO: 42972 - RNA, 21 nt, Artificial Sequence
  GATA2 Guide RNA
uccugggacccucagcuugac

SEQ ID NO: 42973 - RNA, 21 nt, Artificial Sequence
  GATA2 Guide RNA
uccuuccuccagcaacauucc

SEQ ID NO: 42974 - RNA, 21 nt, Artificial Sequence
  GATA2 Guide RNA
ucgggcacaauuccuggcuuc

SEQ ID NO: 42975 - RNA, 21 nt, Artificial Sequence
  GATA2 Guide RNA
ucucugcuuaaaaagggucag

SEQ ID NO: 42976 - RNA, 21 nt, Artificial Sequence
  GATA2 Guide RNA
ucugcccaccgcaugccagca

SEQ ID NO: 42977 - RNA, 21 nt, Artificial Sequence
  GATA2 Guide RNA
ucugcuuaaaaagggucaggg

SEQ ID NO: 42978 - RNA, 21 nt, Artificial Sequence
  GATA2 Guide RNA
ucuggcauauggggcugaccc

SEQ ID NO: 42979 - RNA, 21 nt, Artificial Sequence
  GATA2 Guide RNA
ucugguccacgcuguggcggg

SEQ ID NO: 42980 - RNA, 21 nt, Artificial Sequence
  GATA2 Guide RNA
ucuggugaugggacuaugaag

SEQ ID NO: 42981 - RNA, 21 nt, Artificial Sequence
  GATA2 Guide RNA
ugaaggucgggcacaauuccu

SEQ ID NO: 42982 - RNA, 21 nt, Artificial Sequence
  GATA2 Guide RNA
ugacccacacccucccuggcu

SEQ ID NO: 42983 - RNA, 21 nt, Artificial Sequence
  GATA2 Guide RNA
ugacccuuuuuaagcagagaa

SEQ ID NO: 42984 - RNA, 21 nt, Artificial Sequence
  GATA2 Guide RNA
ugaccugccucugguccacgc

SEQ ID NO: 42985 - RNA, 21 nt, Artificial Sequence
  GATA2 Guide RNA
ugagggucccaggaagccagg

SEQ ID NO: 42986 - RNA, 21 nt, Artificial Sequence
  GATA2 Guide RNA
ugaugggacuaugaaggucgg

SEQ ID NO: 42987 - RNA, 21 nt, Artificial Sequence
  GATA2 Guide RNA
ugccagaacccgcccuuccug

SEQ ID NO: 42988 - RNA, 21 nt, Artificial Sequence
  GATA2 Guide RNA
ugccagcacugcccagccaac

SEQ ID NO: 42989 - RNA, 21 nt, Artificial Sequence
  GATA2 Guide RNA
ugcccaccgcaugccagcacu

SEQ ID NO: 42990 - RNA, 21 nt, Artificial Sequence
  GATA2 Guide RNA
ugcccagccaacugaaguccu

SEQ ID NO: 42991 - RNA, 21 nt, Artificial Sequence
  GATA2 Guide RNA
ugcccgaccuucauaguccca

SEQ ID NO: 42992 - RNA, 21 nt, Artificial Sequence
  GATA2 Guide RNA
ugccucugguccacgcugugg

SEQ ID NO: 42993 - RNA, 21 nt, Artificial Sequence
  GATA2 Guide RNA
ugcggugggcagagccaggga

SEQ ID NO: 42994 - RNA, 21 nt, Artificial Sequence
  GATA2 Guide RNA
ugcuggaggaaggaacuggcc

SEQ ID NO: 42995 - RNA, 21 nt, Artificial Sequence
  GATA2 Guide RNA
ugcuggcaugcggugggcaga

SEQ ID NO: 42996 - RNA, 21 nt, Artificial Sequence
  GATA2 Guide RNA
ugcuuaaaaagggucagggug

SEQ ID NO: 42997 - RNA, 21 nt, Artificial Sequence
  GATA2 Guide RNA
uggaaugguagccaucuggug

SEQ ID NO: 42998 - RNA, 21 nt, Artificial Sequence
  GATA2 Guide RNA
uggaccagaggcaggucaagc

SEQ ID NO: 42999 - RNA, 21 nt, Artificial Sequence
  GATA2 Guide RNA
uggaggaaggaacuggcccuc

SEQ ID NO: 43000 - RNA, 21 nt, Artificial Sequence
  GATA2 Guide RNA
uggcauauggggcugacccac

SEQ ID NO: 43001 - RNA, 21 nt, Artificial Sequence
  GATA2 Guide RNA
uggcaugcggugggcagagcc

SEQ ID NO: 43002 - RNA, 21 nt, Artificial Sequence
  GATA2 Guide RNA
uggcccucugaaaacuggugg

SEQ ID NO: 43003 - RNA, 21 nt, Artificial Sequence
  GATA2 Guide RNA
uggcggggugggaggaauguu

SEQ ID NO: 43004 - RNA, 21 nt, Artificial Sequence
  GATA2 Guide RNA
uggcuaccauuccaggaaggg

SEQ ID NO: 43005 - RNA, 21 nt, Artificial Sequence
  GATA2 Guide RNA
uggcucugcccaccgcaugcc

SEQ ID NO: 43006 - RNA, 21 nt, Artificial Sequence
  GATA2 Guide RNA
uggcugggcagugcuggcaug

SEQ ID NO: 43007 - RNA, 21 nt, Artificial Sequence
  GATA2 Guide RNA
uggcuuccugggacccucagc

SEQ ID NO: 43008 - RNA, 21 nt, Artificial Sequence
  GATA2 Guide RNA
ugggacccucagcuugaccug

SEQ ID NO: 43009 - RNA, 21 nt, Artificial Sequence
  GATA2 Guide RNA
ugggacuaugaaggucgggca

SEQ ID NO: 43010 - RNA, 21 nt, Artificial Sequence
  GATA2 Guide RNA
ugggaggaauguugcuggagg

SEQ ID NO: 43011 - RNA, 21 nt, Artificial Sequence
  GATA2 Guide RNA
ugggcagagccagggagggug

SEQ ID NO: 43012 - RNA, 21 nt, Artificial Sequence
  GATA2 Guide RNA
ugggcagugcuggcaugcggu

SEQ ID NO: 43013 - RNA, 21 nt, Artificial Sequence
  GATA2 Guide RNA
uggggcugacccacacccucc

SEQ ID NO: 43014 - RNA, 21 nt, Artificial Sequence
  GATA2 Guide RNA
ugggucagccccauaugccag

SEQ ID NO: 43015 - RNA, 21 nt, Artificial Sequence
  GATA2 Guide RNA
ugguagccaucuggugauggg

SEQ ID NO: 43016 - RNA, 21 nt, Artificial Sequence
  GATA2 Guide RNA
ugguccacgcuguggcggggu

SEQ ID NO: 43017 - RNA, 21 nt, Artificial Sequence
  GATA2 Guide RNA
uggugaugggacuaugaaggu

SEQ ID NO: 43018 - RNA, 21 nt, Artificial Sequence
  GATA2 Guide RNA
ugguuucucugcuuaaaaagg

SEQ ID NO: 43019 - RNA, 21 nt, Artificial Sequence
  GATA2 Guide RNA
ugugcccgaccuucauagucc

SEQ ID NO: 43020 - RNA, 21 nt, Artificial Sequence
  GATA2 Guide RNA
uguggcggggugggaggaaug

SEQ ID NO: 43021 - RNA, 21 nt, Artificial Sequence
  GATA2 Guide RNA
ugugggucagccccauaugcc

SEQ ID NO: 43022 - RNA, 21 nt, Artificial Sequence
  GATA2 Guide RNA
uguugcuggaggaaggaacug

SEQ ID NO: 43023 - RNA, 21 nt, Artificial Sequence
  GATA2 Guide RNA
uuaaaaagggucagggugggg

SEQ ID NO: 43024 - RNA, 21 nt, Artificial Sequence
  GATA2 Guide RNA
uuaagcagagaaaccacuucc

SEQ ID NO: 43025 - RNA, 21 nt, Artificial Sequence
  GATA2 Guide RNA
uucagagggccaguuccuucc

SEQ ID NO: 43026 - RNA, 21 nt, Artificial Sequence
  GATA2 Guide RNA
uucaguuggcugggcagugcu

SEQ ID NO: 43027 - RNA, 21 nt, Artificial Sequence
  GATA2 Guide RNA
uucauagucccaucaccagau

SEQ ID NO: 43028 - RNA, 21 nt, Artificial Sequence
  GATA2 Guide RNA
uuccaggaagggcggguucug

SEQ ID NO: 43029 - RNA, 21 nt, Artificial Sequence
  GATA2 Guide RNA
uuccuccagcaacauuccucc

SEQ ID NO: 43030 - RNA, 21 nt, Artificial Sequence
  GATA2 Guide RNA
uuccucccaccccgccacagc

SEQ ID NO: 43031 - RNA, 21 nt, Artificial Sequence
  GATA2 Guide RNA
uuccuggaaugguagccaucu

SEQ ID NO: 43032 - RNA, 21 nt, Artificial Sequence
  GATA2 Guide RNA
uuccuggcuuccugggacccu

SEQ ID NO: 43033 - RNA, 21 nt, Artificial Sequence
  GATA2 Guide RNA
uuccugggacccucagcuuga

SEQ ID NO: 43034 - RNA, 21 nt, Artificial Sequence
  GATA2 Guide RNA
uuccuuccuccagcaacauuc

SEQ ID NO: 43035 - RNA, 21 nt, Artificial Sequence
  GATA2 Guide RNA
uucucugcuuaaaaaggguca

SEQ ID NO: 43036 - RNA, 21 nt, Artificial Sequence
  GATA2 Guide RNA
uucuggcauauggggcugacc

SEQ ID NO: 43037 - RNA, 21 nt, Artificial Sequence
  GATA2 Guide RNA
uugaccugccucugguccacg

SEQ ID NO: 43038 - RNA, 21 nt, Artificial Sequence
  GATA2 Guide RNA
uugcuggaggaaggaacuggc

SEQ ID NO: 43039 - RNA, 21 nt, Artificial Sequence
  GATA2 Guide RNA
uuggcugggcagugcuggcau

SEQ ID NO: 43040 - RNA, 21 nt, Artificial Sequence
  GATA2 Guide RNA
uugugcccgaccuucauaguc

SEQ ID NO: 43041 - RNA, 21 nt, Artificial Sequence
  GATA2 Guide RNA
uuuaagcagagaaaccacuuc

SEQ ID NO: 43042 - RNA, 21 nt, Artificial Sequence
  GATA2 Guide RNA
uuucagagggccaguuccuuc

SEQ ID NO: 43043 - RNA, 21 nt, Artificial Sequence
  GATA2 Guide RNA
uuucucugcuuaaaaaggguc

SEQ ID NO: 43044 - RNA, 21 nt, Artificial Sequence
  GATA2 Guide RNA
uuuuaagcagagaaaccacuu

SEQ ID NO: 43045 - RNA, 21 nt, Artificial Sequence
  GATA2 Guide RNA
uuuucagagggccaguuccuu

SEQ ID NO: 43046 - RNA, 21 nt, Artificial Sequence
  GATA2 Guide RNA
uuuuuaagcagagaaaccacu

SEQ ID NO: 43047 - RNA, 22 nt, Artificial Sequence
  GATA2 Guide RNA
aacauuccucccaccccgccac

SEQ ID NO: 43048 - RNA, 22 nt, Artificial Sequence
  GATA2 Guide RNA
aaccaccaguuuucagagggcc

SEQ ID NO: 43049 - RNA, 22 nt, Artificial Sequence
  GATA2 Guide RNA
aacccgcccuuccuggaauggu

SEQ ID NO: 43050 - RNA, 22 nt, Artificial Sequence
  GATA2 Guide RNA
aaccuagaggcaaccaccaguu

SEQ ID NO: 43051 - RNA, 22 nt, Artificial Sequence
  GATA2 Guide RNA
aacuggcccucugaaaacuggu

SEQ ID NO: 43052 - RNA, 22 nt, Artificial Sequence
  GATA2 Guide RNA
aagccaggaauugugcccgacc

SEQ ID NO: 43053 - RNA, 22 nt, Artificial Sequence
  GATA2 Guide RNA
aagcugagggucccaggaagcc

SEQ ID NO: 43054 - RNA, 22 nt, Artificial Sequence
  GATA2 Guide RNA
aaggaacuggcccucugaaaac

SEQ ID NO: 43055 - RNA, 22 nt, Artificial Sequence
  GATA2 Guide RNA
aagggcggguucuggcauaugg

SEQ ID NO: 43056 - RNA, 22 nt, Artificial Sequence
  GATA2 Guide RNA
aaggucgggcacaauuccuggc

SEQ ID NO: 43057 - RNA, 22 nt, Artificial Sequence
  GATA2 Guide RNA
aagugguuucucugcuuaaaaa

SEQ ID NO: 43058 - RNA, 22 nt, Artificial Sequence
  GATA2 Guide RNA
aaugguagccaucuggugaugg

SEQ ID NO: 43059 - RNA, 22 nt, Artificial Sequence
  GATA2 Guide RNA
aauguugcuggaggaaggaacu

SEQ ID NO: 43060 - RNA, 22 nt, Artificial Sequence
  GATA2 Guide RNA
aauuccuggcuuccugggaccc

SEQ ID NO: 43061 - RNA, 22 nt, Artificial Sequence
  GATA2 Guide RNA
aauugugcccgaccuucauagu

SEQ ID NO: 43062 - RNA, 22 nt, Artificial Sequence
  GATA2 Guide RNA
acaauuccuggcuuccugggac

SEQ ID NO: 43063 - RNA, 22 nt, Artificial Sequence
  GATA2 Guide RNA
acacccucccuggcucugccca

SEQ ID NO: 43064 - RNA, 22 nt, Artificial Sequence
  GATA2 Guide RNA
acagcguggaccagaggcaggu

SEQ ID NO: 43065 - RNA, 22 nt, Artificial Sequence
  GATA2 Guide RNA
acauuccucccaccccgccaca

SEQ ID NO: 43066 - RNA, 22 nt, Artificial Sequence
  GATA2 Guide RNA
accaccaguuuucagagggcca

SEQ ID NO: 43067 - RNA, 22 nt, Artificial Sequence
  GATA2 Guide RNA
accagaggcaggucaagcugag

SEQ ID NO: 43068 - RNA, 22 nt, Artificial Sequence
  GATA2 Guide RNA
accagauggcuaccauuccagg

SEQ ID NO: 43069 - RNA, 22 nt, Artificial Sequence
  GATA2 Guide RNA
accaguuuucagagggccaguu

SEQ ID NO: 43070 - RNA, 22 nt, Artificial Sequence
  GATA2 Guide RNA
accauuccaggaagggcggguu

SEQ ID NO: 43071 - RNA, 22 nt, Artificial Sequence
  GATA2 Guide RNA
acccacacccucccuggcucug

SEQ ID NO: 43072 - RNA, 22 nt, Artificial Sequence
  GATA2 Guide RNA
accccgccacagcguggaccag

SEQ ID NO: 43073 - RNA, 22 nt, Artificial Sequence
  GATA2 Guide RNA
acccgcccuuccuggaauggua

SEQ ID NO: 43074 - RNA, 22 nt, Artificial Sequence
  GATA2 Guide RNA
acccucagcuugaccugccucu

SEQ ID NO: 43075 - RNA, 22 nt, Artificial Sequence
  GATA2 Guide RNA
acccucccuggcucugcccacc

SEQ ID NO: 43076 - RNA, 22 nt, Artificial Sequence
  GATA2 Guide RNA
acccugacccuuuuuaagcaga

SEQ ID NO: 43077 - RNA, 22 nt, Artificial Sequence
  GATA2 Guide RNA
acccuuuuuaagcagagaaacc

SEQ ID NO: 43078 - RNA, 22 nt, Artificial Sequence
  GATA2 Guide RNA
accgcaugccagcacugcccag

SEQ ID NO: 43079 - RNA, 22 nt, Artificial Sequence
  GATA2 Guide RNA
accuagaggcaaccaccaguuu

SEQ ID NO: 43080 - RNA, 22 nt, Artificial Sequence
  GATA2 Guide RNA
accugccucugguccacgcugu

SEQ ID NO: 43081 - RNA, 22 nt, Artificial Sequence
  GATA2 Guide RNA
accuucauagucccaucaccag

SEQ ID NO: 43082 - RNA, 22 nt, Artificial Sequence
  GATA2 Guide RNA
acgcuguggcggggugggagga

SEQ ID NO: 43083 - RNA, 22 nt, Artificial Sequence
  GATA2 Guide RNA
acuagggaagugguuucucugc

SEQ ID NO: 43084 - RNA, 22 nt, Artificial Sequence
  GATA2 Guide RNA
acuaugaaggucgggcacaauu

SEQ ID NO: 43085 - RNA, 22 nt, Artificial Sequence
  GATA2 Guide RNA
acugcccagccaacugaagucc

SEQ ID NO: 43086 - RNA, 22 nt, Artificial Sequence
  GATA2 Guide RNA
acuggcccucugaaaacuggug

SEQ ID NO: 43087 - RNA, 22 nt, Artificial Sequence
  GATA2 Guide RNA
acuucaguuggcugggcagugc

SEQ ID NO: 43088 - RNA, 22 nt, Artificial Sequence
  GATA2 Guide RNA
agaacccgcccuuccuggaaug

SEQ ID NO: 43089 - RNA, 22 nt, Artificial Sequence
  GATA2 Guide RNA
agagccagggaggguguggguc

SEQ ID NO: 43090 - RNA, 22 nt, Artificial Sequence
  GATA2 Guide RNA
agaggcaaccaccaguuuucag

SEQ ID NO: 43091 - RNA, 22 nt, Artificial Sequence
  GATA2 Guide RNA
agaggcaggucaagcugagggu

SEQ ID NO: 43092 - RNA, 22 nt, Artificial Sequence
  GATA2 Guide RNA
agagggccaguuccuuccucca

SEQ ID NO: 43093 - RNA, 22 nt, Artificial Sequence
  GATA2 Guide RNA
agauggcuaccauuccaggaag

SEQ ID NO: 43094 - RNA, 22 nt, Artificial Sequence
  GATA2 Guide RNA
agcaacauuccucccaccccgc

SEQ ID NO: 43095 - RNA, 22 nt, Artificial Sequence
  GATA2 Guide RNA
agcacugcccagccaacugaag

SEQ ID NO: 43096 - RNA, 22 nt, Artificial Sequence
  GATA2 Guide RNA
agccaacugaaguccucccccc

SEQ ID NO: 43097 - RNA, 22 nt, Artificial Sequence
  GATA2 Guide RNA
agccaggaauugugcccgaccu

SEQ ID NO: 43098 - RNA, 22 nt, Artificial Sequence
  GATA2 Guide RNA
agccagggagggugugggucag

SEQ ID NO: 43099 - RNA, 22 nt, Artificial Sequence
  GATA2 Guide RNA
agccaucuggugaugggacuau

SEQ ID NO: 43100 - RNA, 22 nt, Artificial Sequence
  GATA2 Guide RNA
agccccauaugccagaacccgc

SEQ ID NO: 43101 - RNA, 22 nt, Artificial Sequence
  GATA2 Guide RNA
agcguggaccagaggcagguca

SEQ ID NO: 43102 - RNA, 22 nt, Artificial Sequence
  GATA2 Guide RNA
agcugagggucccaggaagcca

SEQ ID NO: 43103 - RNA, 22 nt, Artificial Sequence
  GATA2 Guide RNA
agcuugaccugccucuggucca

SEQ ID NO: 43104 - RNA, 22 nt, Artificial Sequence
  GATA2 Guide RNA
aggaacuggcccucugaaaacu

SEQ ID NO: 43105 - RNA, 22 nt, Artificial Sequence
  GATA2 Guide RNA
aggaagccaggaauugugcccg

SEQ ID NO: 43106 - RNA, 22 nt, Artificial Sequence
  GATA2 Guide RNA
aggaaggaacuggcccucugaa

SEQ ID NO: 43107 - RNA, 22 nt, Artificial Sequence
  GATA2 Guide RNA
aggaagggcggguucuggcaua

SEQ ID NO: 43108 - RNA, 22 nt, Artificial Sequence
  GATA2 Guide RNA
aggaauguugcuggaggaagga

SEQ ID NO: 43109 - RNA, 22 nt, Artificial Sequence
  GATA2 Guide RNA
aggaauugugcccgaccuucau

SEQ ID NO: 43110 - RNA, 22 nt, Artificial Sequence
  GATA2 Guide RNA
aggacuucaguuggcugggcag

SEQ ID NO: 43111 - RNA, 22 nt, Artificial Sequence
  GATA2 Guide RNA
aggcaaccaccaguuuucagag

SEQ ID NO: 43112 - RNA, 22 nt, Artificial Sequence
  GATA2 Guide RNA
aggcaggucaagcugagggucc

SEQ ID NO: 43113 - RNA, 22 nt, Artificial Sequence
  GATA2 Guide RNA
agggaagugguuucucugcuua

SEQ ID NO: 43114 - RNA, 22 nt, Artificial Sequence
  GATA2 Guide RNA
agggagggugugggucagcccc

SEQ ID NO: 43115 - RNA, 22 nt, Artificial Sequence
  GATA2 Guide RNA
agggccaguuccuuccuccagc

SEQ ID NO: 43116 - RNA, 22 nt, Artificial Sequence
  GATA2 Guide RNA
agggcggguucuggcauauggg

SEQ ID NO: 43117 - RNA, 22 nt, Artificial Sequence
  GATA2 Guide RNA
agggucccaggaagccaggaau

SEQ ID NO: 43118 - RNA, 22 nt, Artificial Sequence
  GATA2 Guide RNA
agggugugggucagccccauau

SEQ ID NO: 43119 - RNA, 22 nt, Artificial Sequence
  GATA2 Guide RNA
aggucaagcugagggucccagg

SEQ ID NO: 43120 - RNA, 22 nt, Artificial Sequence
  GATA2 Guide RNA
aggucgggcacaauuccuggcu

SEQ ID NO: 43121 - RNA, 22 nt, Artificial Sequence
  GATA2 Guide RNA
agucccaucaccagauggcuac

SEQ ID NO: 43122 - RNA, 22 nt, Artificial Sequence
  GATA2 Guide RNA
agugcuggcaugcggugggcag

SEQ ID NO: 43123 - RNA, 22 nt, Artificial Sequence
  GATA2 Guide RNA
agugguuucucugcuuaaaaag

SEQ ID NO: 43124 - RNA, 22 nt, Artificial Sequence
  GATA2 Guide RNA
aguuccuuccuccagcaacauu

SEQ ID NO: 43125 - RNA, 22 nt, Artificial Sequence
  GATA2 Guide RNA
aguuggcugggcagugcuggca

SEQ ID NO: 43126 - RNA, 22 nt, Artificial Sequence
  GATA2 Guide RNA
aguuuucagagggccaguuccu

SEQ ID NO: 43127 - RNA, 22 nt, Artificial Sequence
  GATA2 Guide RNA
auagucccaucaccagauggcu

SEQ ID NO: 43128 - RNA, 22 nt, Artificial Sequence
  GATA2 Guide RNA
auaugccagaacccgcccuucc

SEQ ID NO: 43129 - RNA, 22 nt, Artificial Sequence
  GATA2 Guide RNA
auauggggcugacccacacccu

SEQ ID NO: 43130 - RNA, 22 nt, Artificial Sequence
  GATA2 Guide RNA
aucaccagauggcuaccauucc

SEQ ID NO: 43131 - RNA, 22 nt, Artificial Sequence
  GATA2 Guide RNA
aucuggugaugggacuaugaag

SEQ ID NO: 43132 - RNA, 22 nt, Artificial Sequence
  GATA2 Guide RNA
augaaggucgggcacaauuccu

SEQ ID NO: 43133 - RNA, 22 nt, Artificial Sequence
  GATA2 Guide RNA
augccagaacccgcccuuccug

SEQ ID NO: 43134 - RNA, 22 nt, Artificial Sequence
  GATA2 Guide RNA
augccagcacugcccagccaac

SEQ ID NO: 43135 - RNA, 22 nt, Artificial Sequence
  GATA2 Guide RNA
augcggugggcagagccaggga

SEQ ID NO: 43136 - RNA, 22 nt, Artificial Sequence
  GATA2 Guide RNA
auggcuaccauuccaggaaggg

SEQ ID NO: 43137 - RNA, 22 nt, Artificial Sequence
  GATA2 Guide RNA
augggacuaugaaggucgggca

SEQ ID NO: 43138 - RNA, 22 nt, Artificial Sequence
  GATA2 Guide RNA
auggggcugacccacacccucc

SEQ ID NO: 43139 - RNA, 22 nt, Artificial Sequence
  GATA2 Guide RNA
augguagccaucuggugauggg

SEQ ID NO: 43140 - RNA, 22 nt, Artificial Sequence
  GATA2 Guide RNA
auguugcuggaggaaggaacug

SEQ ID NO: 43141 - RNA, 22 nt, Artificial Sequence
  GATA2 Guide RNA
auuccaggaagggcggguucug

SEQ ID NO: 43142 - RNA, 22 nt, Artificial Sequence
  GATA2 Guide RNA
auuccucccaccccgccacagc

SEQ ID NO: 43143 - RNA, 22 nt, Artificial Sequence
  GATA2 Guide RNA
auuccuggcuuccugggacccu

SEQ ID NO: 43144 - RNA, 22 nt, Artificial Sequence
  GATA2 Guide RNA
auugugcccgaccuucauaguc

SEQ ID NO: 43145 - RNA, 22 nt, Artificial Sequence
  GATA2 Guide RNA
caacauuccucccaccccgcca

SEQ ID NO: 43146 - RNA, 22 nt, Artificial Sequence
  GATA2 Guide RNA
caaccaccaguuuucagagggc

SEQ ID NO: 43147 - RNA, 22 nt, Artificial Sequence
  GATA2 Guide RNA
caagcugagggucccaggaagc

SEQ ID NO: 43148 - RNA, 22 nt, Artificial Sequence
  GATA2 Guide RNA
caauuccuggcuuccugggacc

SEQ ID NO: 43149 - RNA, 22 nt, Artificial Sequence
  GATA2 Guide RNA
cacaauuccuggcuuccuggga

SEQ ID NO: 43150 - RNA, 22 nt, Artificial Sequence
  GATA2 Guide RNA
cacacccucccuggcucugccc

SEQ ID NO: 43151 - RNA, 22 nt, Artificial Sequence
  GATA2 Guide RNA
cacagcguggaccagaggcagg

SEQ ID NO: 43152 - RNA, 22 nt, Artificial Sequence
  GATA2 Guide RNA
caccagauggcuaccauuccag

SEQ ID NO: 43153 - RNA, 22 nt, Artificial Sequence
  GATA2 Guide RNA
caccaguuuucagagggccagu

SEQ ID NO: 43154 - RNA, 22 nt, Artificial Sequence
  GATA2 Guide RNA
caccccgccacagcguggacca

SEQ ID NO: 43155 - RNA, 22 nt, Artificial Sequence
  GATA2 Guide RNA
cacccucccuggcucugcccac

SEQ ID NO: 43156 - RNA, 22 nt, Artificial Sequence
  GATA2 Guide RNA
cacccugacccuuuuuaagcag

SEQ ID NO: 43157 - RNA, 22 nt, Artificial Sequence
  GATA2 Guide RNA
caccgcaugccagcacugccca

SEQ ID NO: 43158 - RNA, 22 nt, Artificial Sequence
  GATA2 Guide RNA
cacgcuguggcggggugggagg

SEQ ID NO: 43159 - RNA, 22 nt, Artificial Sequence
  GATA2 Guide RNA
cacugcccagccaacugaaguc

SEQ ID NO: 43160 - RNA, 22 nt, Artificial Sequence
  GATA2 Guide RNA
cagaacccgcccuuccuggaau

SEQ ID NO: 43161 - RNA, 22 nt, Artificial Sequence
  GATA2 Guide RNA
cagagccagggagggugugggu

SEQ ID NO: 43162 - RNA, 22 nt, Artificial Sequence
  GATA2 Guide RNA
cagaggcaggucaagcugaggg

SEQ ID NO: 43163 - RNA, 22 nt, Artificial Sequence
  GATA2 Guide RNA
cagagggccaguuccuuccucc

SEQ ID NO: 43164 - RNA, 22 nt, Artificial Sequence
  GATA2 Guide RNA
cagauggcuaccauuccaggaa

SEQ ID NO: 43165 - RNA, 22 nt, Artificial Sequence
  GATA2 Guide RNA
cagcaacauuccucccaccccg

SEQ ID NO: 43166 - RNA, 22 nt, Artificial Sequence
  GATA2 Guide RNA
cagcacugcccagccaacugaa

SEQ ID NO: 43167 - RNA, 22 nt, Artificial Sequence
  GATA2 Guide RNA
cagccaacugaaguccuccccc

SEQ ID NO: 43168 - RNA, 22 nt, Artificial Sequence
  GATA2 Guide RNA
cagccccauaugccagaacccg

SEQ ID NO: 43169 - RNA, 22 nt, Artificial Sequence
  GATA2 Guide RNA
cagcguggaccagaggcagguc

SEQ ID NO: 43170 - RNA, 22 nt, Artificial Sequence
  GATA2 Guide RNA
cagcuugaccugccucuggucc

SEQ ID NO: 43171 - RNA, 22 nt, Artificial Sequence
  GATA2 Guide RNA
caggaagccaggaauugugccc

SEQ ID NO: 43172 - RNA, 22 nt, Artificial Sequence
  GATA2 Guide RNA
caggaagggcggguucuggcau

SEQ ID NO: 43173 - RNA, 22 nt, Artificial Sequence
  GATA2 Guide RNA
caggaauugugcccgaccuuca

SEQ ID NO: 43174 - RNA, 22 nt, Artificial Sequence
  GATA2 Guide RNA
cagggagggugugggucagccc

SEQ ID NO: 43175 - RNA, 22 nt, Artificial Sequence
  GATA2 Guide RNA
caggucaagcugagggucccag

SEQ ID NO: 43176 - RNA, 22 nt, Artificial Sequence
  GATA2 Guide RNA
cagugcuggcaugcggugggca

SEQ ID NO: 43177 - RNA, 22 nt, Artificial Sequence
  GATA2 Guide RNA
caguuccuuccuccagcaacau

SEQ ID NO: 43178 - RNA, 22 nt, Artificial Sequence
  GATA2 Guide RNA
caguuggcugggcagugcuggc

SEQ ID NO: 43179 - RNA, 22 nt, Artificial Sequence
  GATA2 Guide RNA
caguuuucagagggccaguucc

SEQ ID NO: 43180 - RNA, 22 nt, Artificial Sequence
  GATA2 Guide RNA
cauagucccaucaccagauggc

SEQ ID NO: 43181 - RNA, 22 nt, Artificial Sequence
  GATA2 Guide RNA
cauaugccagaacccgcccuuc

SEQ ID NO: 43182 - RNA, 22 nt, Artificial Sequence
  GATA2 Guide RNA
cauauggggcugacccacaccc

SEQ ID NO: 43183 - RNA, 22 nt, Artificial Sequence
  GATA2 Guide RNA
caucaccagauggcuaccauuc

SEQ ID NO: 43184 - RNA, 22 nt, Artificial Sequence
  GATA2 Guide RNA
caucuggugaugggacuaugaa

SEQ ID NO: 43185 - RNA, 22 nt, Artificial Sequence
  GATA2 Guide RNA
caugccagcacugcccagccaa

SEQ ID NO: 43186 - RNA, 22 nt, Artificial Sequence
  GATA2 Guide RNA
caugcggugggcagagccaggg

SEQ ID NO: 43187 - RNA, 22 nt, Artificial Sequence
  GATA2 Guide RNA
cauuccaggaagggcggguucu

SEQ ID NO: 43188 - RNA, 22 nt, Artificial Sequence
  GATA2 Guide RNA
cauuccucccaccccgccacag

SEQ ID NO: 43189 - RNA, 22 nt, Artificial Sequence
  GATA2 Guide RNA
ccacacccucccuggcucugcc

SEQ ID NO: 43190 - RNA, 22 nt, Artificial Sequence
  GATA2 Guide RNA
ccacagcguggaccagaggcag

SEQ ID NO: 43191 - RNA, 22 nt, Artificial Sequence
  GATA2 Guide RNA
ccaccaguuuucagagggccag

SEQ ID NO: 43192 - RNA, 22 nt, Artificial Sequence
  GATA2 Guide RNA
ccaccccgccacagcguggacc

SEQ ID NO: 43193 - RNA, 22 nt, Artificial Sequence
  GATA2 Guide RNA
ccacccugacccuuuuuaagca

SEQ ID NO: 43194 - RNA, 22 nt, Artificial Sequence
  GATA2 Guide RNA
ccaccgcaugccagcacugccc

SEQ ID NO: 43195 - RNA, 22 nt, Artificial Sequence
  GATA2 Guide RNA
ccacgcuguggcggggugggag

SEQ ID NO: 43196 - RNA, 22 nt, Artificial Sequence
  GATA2 Guide RNA
ccagaacccgcccuuccuggaa

SEQ ID NO: 43197 - RNA, 22 nt, Artificial Sequence
  GATA2 Guide RNA
ccagaggcaggucaagcugagg

SEQ ID NO: 43198 - RNA, 22 nt, Artificial Sequence
  GATA2 Guide RNA
ccagauggcuaccauuccagga

SEQ ID NO: 43199 - RNA, 22 nt, Artificial Sequence
  GATA2 Guide RNA
ccagcaacauuccucccacccc

SEQ ID NO: 43200 - RNA, 22 nt, Artificial Sequence
  GATA2 Guide RNA
ccagcacugcccagccaacuga

SEQ ID NO: 43201 - RNA, 22 nt, Artificial Sequence
  GATA2 Guide RNA
ccagccaacugaaguccucccc

SEQ ID NO: 43202 - RNA, 22 nt, Artificial Sequence
  GATA2 Guide RNA
ccaggaagccaggaauugugcc

SEQ ID NO: 43203 - RNA, 22 nt, Artificial Sequence
  GATA2 Guide RNA
ccaggaagggcggguucuggca

SEQ ID NO: 43204 - RNA, 22 nt, Artificial Sequence
  GATA2 Guide RNA
ccaggaauugugcccgaccuuc

SEQ ID NO: 43205 - RNA, 22 nt, Artificial Sequence
  GATA2 Guide RNA
ccagggagggugugggucagcc

SEQ ID NO: 43206 - RNA, 22 nt, Artificial Sequence
  GATA2 Guide RNA
ccaguuccuuccuccagcaaca

SEQ ID NO: 43207 - RNA, 22 nt, Artificial Sequence
  GATA2 Guide RNA
ccaguuuucagagggccaguuc

SEQ ID NO: 43208 - RNA, 22 nt, Artificial Sequence
  GATA2 Guide RNA
ccauaugccagaacccgcccuu

SEQ ID NO: 43209 - RNA, 22 nt, Artificial Sequence
  GATA2 Guide RNA
ccaucaccagauggcuaccauu

SEQ ID NO: 43210 - RNA, 22 nt, Artificial Sequence
  GATA2 Guide RNA
ccaucuggugaugggacuauga

SEQ ID NO: 43211 - RNA, 22 nt, Artificial Sequence
  GATA2 Guide RNA
ccauuccaggaagggcggguuc

SEQ ID NO: 43212 - RNA, 22 nt, Artificial Sequence
  GATA2 Guide RNA
cccacacccucccuggcucugc

SEQ ID NO: 43213 - RNA, 22 nt, Artificial Sequence
  GATA2 Guide RNA
cccaccccgccacagcguggac

SEQ ID NO: 43214 - RNA, 22 nt, Artificial Sequence
  GATA2 Guide RNA
cccacccugacccuuuuuaagc

SEQ ID NO: 43215 - RNA, 22 nt, Artificial Sequence
  GATA2 Guide RNA
cccaccgcaugccagcacugcc

SEQ ID NO: 43216 - RNA, 22 nt, Artificial Sequence
  GATA2 Guide RNA
cccagccaacugaaguccuccc

SEQ ID NO: 43217 - RNA, 22 nt, Artificial Sequence
  GATA2 Guide RNA
cccaggaagccaggaauugugc

SEQ ID NO: 43218 - RNA, 22 nt, Artificial Sequence
  GATA2 Guide RNA
cccauaugccagaacccgcccu

SEQ ID NO: 43219 - RNA, 22 nt, Artificial Sequence
  GATA2 Guide RNA
cccaucaccagauggcuaccau

SEQ ID NO: 43220 - RNA, 22 nt, Artificial Sequence
  GATA2 Guide RNA
ccccacccugacccuuuuuaag

SEQ ID NO: 43221 - RNA, 22 nt, Artificial Sequence
  GATA2 Guide RNA
ccccauaugccagaacccgccc

SEQ ID NO: 43222 - RNA, 22 nt, Artificial Sequence
  GATA2 Guide RNA
cccccacccugacccuuuuuaa

SEQ ID NO: 43223 - RNA, 22 nt, Artificial Sequence
  GATA2 Guide RNA
ccccccacccugacccuuuuua

SEQ ID NO: 43224 - RNA, 22 nt, Artificial Sequence
  GATA2 Guide RNA
ccccgccacagcguggaccaga

SEQ ID NO: 43225 - RNA, 22 nt, Artificial Sequence
  GATA2 Guide RNA
cccgaccuucauagucccauca

SEQ ID NO: 43226 - RNA, 22 nt, Artificial Sequence
  GATA2 Guide RNA
cccgccacagcguggaccagag

SEQ ID NO: 43227 - RNA, 22 nt, Artificial Sequence
  GATA2 Guide RNA
cccgcccuuccuggaaugguag

SEQ ID NO: 43228 - RNA, 22 nt, Artificial Sequence
  GATA2 Guide RNA
cccucagcuugaccugccucug

SEQ ID NO: 43229 - RNA, 22 nt, Artificial Sequence
  GATA2 Guide RNA
cccucccuggcucugcccaccg

SEQ ID NO: 43230 - RNA, 22 nt, Artificial Sequence
  GATA2 Guide RNA
cccucugaaaacuggugguugc

SEQ ID NO: 43231 - RNA, 22 nt, Artificial Sequence
  GATA2 Guide RNA
cccugacccuuuuuaagcagag

SEQ ID NO: 43232 - RNA, 22 nt, Artificial Sequence
  GATA2 Guide RNA
cccuggcucugcccaccgcaug

SEQ ID NO: 43233 - RNA, 22 nt, Artificial Sequence
  GATA2 Guide RNA
cccuuccuggaaugguagccau

SEQ ID NO: 43234 - RNA, 22 nt, Artificial Sequence
  GATA2 Guide RNA
cccuuuuuaagcagagaaacca

SEQ ID NO: 43235 - RNA, 22 nt, Artificial Sequence
  GATA2 Guide RNA
ccgaccuucauagucccaucac

SEQ ID NO: 43236 - RNA, 22 nt, Artificial Sequence
  GATA2 Guide RNA
ccgcaugccagcacugcccagc

SEQ ID NO: 43237 - RNA, 22 nt, Artificial Sequence
  GATA2 Guide RNA
ccgccacagcguggaccagagg

SEQ ID NO: 43238 - RNA, 22 nt, Artificial Sequence
  GATA2 Guide RNA
ccgcccuuccuggaaugguagc

SEQ ID NO: 43239 - RNA, 22 nt, Artificial Sequence
  GATA2 Guide RNA
ccuagaggcaaccaccaguuuu

SEQ ID NO: 43240 - RNA, 22 nt, Artificial Sequence
  GATA2 Guide RNA
ccucagcuugaccugccucugg

SEQ ID NO: 43241 - RNA, 22 nt, Artificial Sequence
  GATA2 Guide RNA
ccuccagcaacauuccucccac

SEQ ID NO: 43242 - RNA, 22 nt, Artificial Sequence
  GATA2 Guide RNA
ccucccaccccgccacagcgug

SEQ ID NO: 43243 - RNA, 22 nt, Artificial Sequence
  GATA2 Guide RNA
ccucccuggcucugcccaccgc

SEQ ID NO: 43244 - RNA, 22 nt, Artificial Sequence
  GATA2 Guide RNA
ccucugaaaacuggugguugcc

SEQ ID NO: 43245 - RNA, 22 nt, Artificial Sequence
  GATA2 Guide RNA
ccucugguccacgcuguggcgg

SEQ ID NO: 43246 - RNA, 22 nt, Artificial Sequence
  GATA2 Guide RNA
ccugacccuuuuuaagcagaga

SEQ ID NO: 43247 - RNA, 22 nt, Artificial Sequence
  GATA2 Guide RNA
ccugccucugguccacgcugug

SEQ ID NO: 43248 - RNA, 22 nt, Artificial Sequence
  GATA2 Guide RNA
ccuggaaugguagccaucuggu

SEQ ID NO: 43249 - RNA, 22 nt, Artificial Sequence
  GATA2 Guide RNA
ccuggcucugcccaccgcaugc

SEQ ID NO: 43250 - RNA, 22 nt, Artificial Sequence
  GATA2 Guide RNA
ccuggcuuccugggacccucag

SEQ ID NO: 43251 - RNA, 22 nt, Artificial Sequence
  GATA2 Guide RNA
ccugggacccucagcuugaccu

SEQ ID NO: 43252 - RNA, 22 nt, Artificial Sequence
  GATA2 Guide RNA
ccuucauagucccaucaccaga

SEQ ID NO: 43253 - RNA, 22 nt, Artificial Sequence
  GATA2 Guide RNA
ccuuccuccagcaacauuccuc

SEQ ID NO: 43254 - RNA, 22 nt, Artificial Sequence
  GATA2 Guide RNA
ccuuccuggaaugguagccauc

SEQ ID NO: 43255 - RNA, 22 nt, Artificial Sequence
  GATA2 Guide RNA
ccuuuuuaagcagagaaaccac

SEQ ID NO: 43256 - RNA, 22 nt, Artificial Sequence
  GATA2 Guide RNA
cgaccuucauagucccaucacc

SEQ ID NO: 43257 - RNA, 22 nt, Artificial Sequence
  GATA2 Guide RNA
cgcaugccagcacugcccagcc

SEQ ID NO: 43258 - RNA, 22 nt, Artificial Sequence
  GATA2 Guide RNA
cgccacagcguggaccagaggc

SEQ ID NO: 43259 - RNA, 22 nt, Artificial Sequence
  GATA2 Guide RNA
cgcccuuccuggaaugguagcc

SEQ ID NO: 43260 - RNA, 22 nt, Artificial Sequence
  GATA2 Guide RNA
cgcuguggcggggugggaggaa

SEQ ID NO: 43261 - RNA, 22 nt, Artificial Sequence
  GATA2 Guide RNA
cgggcacaauuccuggcuuccu

SEQ ID NO: 43262 - RNA, 22 nt, Artificial Sequence
  GATA2 Guide RNA
cggggugggaggaauguugcug

SEQ ID NO: 43263 - RNA, 22 nt, Artificial Sequence
  GATA2 Guide RNA
cggguucuggcauauggggcug

SEQ ID NO: 43264 - RNA, 22 nt, Artificial Sequence
  GATA2 Guide RNA
cggugggcagagccagggaggg

SEQ ID NO: 43265 - RNA, 22 nt, Artificial Sequence
  GATA2 Guide RNA
cguggaccagaggcaggucaag

SEQ ID NO: 43266 - RNA, 22 nt, Artificial Sequence
  GATA2 Guide RNA
cuaccauuccaggaagggcggg

SEQ ID NO: 43267 - RNA, 22 nt, Artificial Sequence
  GATA2 Guide RNA
cuagaggcaaccaccaguuuuc

SEQ ID NO: 43268 - RNA, 22 nt, Artificial Sequence
  GATA2 Guide RNA
cuagggaagugguuucucugcu

SEQ ID NO: 43269 - RNA, 22 nt, Artificial Sequence
  GATA2 Guide RNA
cuaugaaggucgggcacaauuc

SEQ ID NO: 43270 - RNA, 22 nt, Artificial Sequence
  GATA2 Guide RNA
cucagcuugaccugccucuggu

SEQ ID NO: 43271 - RNA, 22 nt, Artificial Sequence
  GATA2 Guide RNA
cuccagcaacauuccucccacc

SEQ ID NO: 43272 - RNA, 22 nt, Artificial Sequence
  GATA2 Guide RNA
cucccaccccgccacagcgugg

SEQ ID NO: 43273 - RNA, 22 nt, Artificial Sequence
  GATA2 Guide RNA
cucccuggcucugcccaccgca

SEQ ID NO: 43274 - RNA, 22 nt, Artificial Sequence
  GATA2 Guide RNA
cucugcccaccgcaugccagca

SEQ ID NO: 43275 - RNA, 22 nt, Artificial Sequence
  GATA2 Guide RNA
cucugcuuaaaaagggucaggg

SEQ ID NO: 43276 - RNA, 22 nt, Artificial Sequence
  GATA2 Guide RNA
cucugguccacgcuguggcggg

SEQ ID NO: 43277 - RNA, 22 nt, Artificial Sequence
  GATA2 Guide RNA
cugacccacacccucccuggcu

SEQ ID NO: 43278 - RNA, 22 nt, Artificial Sequence
  GATA2 Guide RNA
cugacccuuuuuaagcagagaa

SEQ ID NO: 43279 - RNA, 22 nt, Artificial Sequence
  GATA2 Guide RNA
cugagggucccaggaagccagg

SEQ ID NO: 43280 - RNA, 22 nt, Artificial Sequence
  GATA2 Guide RNA
cugcccaccgcaugccagcacu

SEQ ID NO: 43281 - RNA, 22 nt, Artificial Sequence
  GATA2 Guide RNA
cugcccagccaacugaaguccu

SEQ ID NO: 43282 - RNA, 22 nt, Artificial Sequence
  GATA2 Guide RNA
cugccucugguccacgcugugg

SEQ ID NO: 43283 - RNA, 22 nt, Artificial Sequence
  GATA2 Guide RNA
cugcuuaaaaagggucagggug

SEQ ID NO: 43284 - RNA, 22 nt, Artificial Sequence
  GATA2 Guide RNA
cuggaaugguagccaucuggug

SEQ ID NO: 43285 - RNA, 22 nt, Artificial Sequence
  GATA2 Guide RNA
cuggaggaaggaacuggcccuc

SEQ ID NO: 43286 - RNA, 22 nt, Artificial Sequence
  GATA2 Guide RNA
cuggcauauggggcugacccac

SEQ ID NO: 43287 - RNA, 22 nt, Artificial Sequence
  GATA2 Guide RNA
cuggcaugcggugggcagagcc

SEQ ID NO: 43288 - RNA, 22 nt, Artificial Sequence
  GATA2 Guide RNA
cuggcccucugaaaacuggugg

SEQ ID NO: 43289 - RNA, 22 nt, Artificial Sequence
  GATA2 Guide RNA
cuggcucugcccaccgcaugcc

SEQ ID NO: 43290 - RNA, 22 nt, Artificial Sequence
  GATA2 Guide RNA
cuggcuuccugggacccucagc

SEQ ID NO: 43291 - RNA, 22 nt, Artificial Sequence
  GATA2 Guide RNA
cugggacccucagcuugaccug

SEQ ID NO: 43292 - RNA, 22 nt, Artificial Sequence
  GATA2 Guide RNA
cugggcagugcuggcaugcggu

SEQ ID NO: 43293 - RNA, 22 nt, Artificial Sequence
  GATA2 Guide RNA
cugguccacgcuguggcggggu

SEQ ID NO: 43294 - RNA, 22 nt, Artificial Sequence
  GATA2 Guide RNA
cuggugaugggacuaugaaggu

SEQ ID NO: 43295 - RNA, 22 nt, Artificial Sequence
  GATA2 Guide RNA
cuguggcggggugggaggaaug

SEQ ID NO: 43296 - RNA, 22 nt, Artificial Sequence
  GATA2 Guide RNA
cuuaaaaagggucagggugggg

SEQ ID NO: 43297 - RNA, 22 nt, Artificial Sequence
  GATA2 Guide RNA
cuucaguuggcugggcagugcu

SEQ ID NO: 43298 - RNA, 22 nt, Artificial Sequence
  GATA2 Guide RNA
cuucauagucccaucaccagau

SEQ ID NO: 43299 - RNA, 22 nt, Artificial Sequence
  GATA2 Guide RNA
cuuccuccagcaacauuccucc

SEQ ID NO: 43300 - RNA, 22 nt, Artificial Sequence
  GATA2 Guide RNA
cuuccuggaaugguagccaucu

SEQ ID NO: 43301 - RNA, 22 nt, Artificial Sequence
  GATA2 Guide RNA
cuuccugggacccucagcuuga

SEQ ID NO: 43302 - RNA, 22 nt, Artificial Sequence
  GATA2 Guide RNA
cuugaccugccucugguccacg

SEQ ID NO: 43303 - RNA, 22 nt, Artificial Sequence
  GATA2 Guide RNA
cuuuuuaagcagagaaaccacu

SEQ ID NO: 43304 - RNA, 22 nt, Artificial Sequence
  GATA2 Guide RNA
gaacccgcccuuccuggaaugg

SEQ ID NO: 43305 - RNA, 22 nt, Artificial Sequence
  GATA2 Guide RNA
gaacuggcccucugaaaacugg

SEQ ID NO: 43306 - RNA, 22 nt, Artificial Sequence
  GATA2 Guide RNA
gaagccaggaauugugcccgac

SEQ ID NO: 43307 - RNA, 22 nt, Artificial Sequence
  GATA2 Guide RNA
gaaggaacuggcccucugaaaa

SEQ ID NO: 43308 - RNA, 22 nt, Artificial Sequence
  GATA2 Guide RNA
gaagggcggguucuggcauaug

SEQ ID NO: 43309 - RNA, 22 nt, Artificial Sequence
  GATA2 Guide RNA
gaaggucgggcacaauuccugg

SEQ ID NO: 43310 - RNA, 22 nt, Artificial Sequence
  GATA2 Guide RNA
gaagugguuucucugcuuaaaa

SEQ ID NO: 43311 - RNA, 22 nt, Artificial Sequence
  GATA2 Guide RNA
gaaugguagccaucuggugaug

SEQ ID NO: 43312 - RNA, 22 nt, Artificial Sequence
  GATA2 Guide RNA
gaauguugcuggaggaaggaac

SEQ ID NO: 43313 - RNA, 22 nt, Artificial Sequence
  GATA2 Guide RNA
gaauugugcccgaccuucauag

SEQ ID NO: 43314 - RNA, 22 nt, Artificial Sequence
  GATA2 Guide RNA
gaccagaggcaggucaagcuga

SEQ ID NO: 43315 - RNA, 22 nt, Artificial Sequence
  GATA2 Guide RNA
gacccacacccucccuggcucu

SEQ ID NO: 43316 - RNA, 22 nt, Artificial Sequence
  GATA2 Guide RNA
gacccucagcuugaccugccuc

SEQ ID NO: 43317 - RNA, 22 nt, Artificial Sequence
  GATA2 Guide RNA
gacccuuuuuaagcagagaaac

SEQ ID NO: 43318 - RNA, 22 nt, Artificial Sequence
  GATA2 Guide RNA
gaccugccucugguccacgcug

SEQ ID NO: 43319 - RNA, 22 nt, Artificial Sequence
  GATA2 Guide RNA
gaccuucauagucccaucacca

SEQ ID NO: 43320 - RNA, 22 nt, Artificial Sequence
  GATA2 Guide RNA
gacuaugaaggucgggcacaau

SEQ ID NO: 43321 - RNA, 22 nt, Artificial Sequence
  GATA2 Guide RNA
gacuucaguuggcugggcagug

SEQ ID NO: 43322 - RNA, 22 nt, Artificial Sequence
  GATA2 Guide RNA
gagccagggaggguguggguca

SEQ ID NO: 43323 - RNA, 22 nt, Artificial Sequence
  GATA2 Guide RNA
gaggaaggaacuggcccucuga

SEQ ID NO: 43324 - RNA, 22 nt, Artificial Sequence
  GATA2 Guide RNA
gaggaauguugcuggaggaagg

SEQ ID NO: 43325 - RNA, 22 nt, Artificial Sequence
  GATA2 Guide RNA
gaggacuucaguuggcugggca

SEQ ID NO: 43326 - RNA, 22 nt, Artificial Sequence
  GATA2 Guide RNA
gaggcaaccaccaguuuucaga

SEQ ID NO: 43327 - RNA, 22 nt, Artificial Sequence
  GATA2 Guide RNA
gaggcaggucaagcugaggguc

SEQ ID NO: 43328 - RNA, 22 nt, Artificial Sequence
  GATA2 Guide RNA
gagggccaguuccuuccuccag

SEQ ID NO: 43329 - RNA, 22 nt, Artificial Sequence
  GATA2 Guide RNA
gagggucccaggaagccaggaa

SEQ ID NO: 43330 - RNA, 22 nt, Artificial Sequence
  GATA2 Guide RNA
gagggugugggucagccccaua

SEQ ID NO: 43331 - RNA, 22 nt, Artificial Sequence
  GATA2 Guide RNA
gauggcuaccauuccaggaagg

SEQ ID NO: 43332 - RNA, 22 nt, Artificial Sequence
  GATA2 Guide RNA
gaugggacuaugaaggucgggc

SEQ ID NO: 43333 - RNA, 22 nt, Artificial Sequence
  GATA2 Guide RNA
gcaacauuccucccaccccgcc

SEQ ID NO: 43334 - RNA, 22 nt, Artificial Sequence
  GATA2 Guide RNA
gcaaccaccaguuuucagaggg

SEQ ID NO: 43335 - RNA, 22 nt, Artificial Sequence
  GATA2 Guide RNA
gcacaauuccuggcuuccuggg

SEQ ID NO: 43336 - RNA, 22 nt, Artificial Sequence
  GATA2 Guide RNA
gcacugcccagccaacugaagu

SEQ ID NO: 43337 - RNA, 22 nt, Artificial Sequence
  GATA2 Guide RNA
gcagagccagggaggguguggg

SEQ ID NO: 43338 - RNA, 22 nt, Artificial Sequence
  GATA2 Guide RNA
gcaggucaagcugaggguccca

SEQ ID NO: 43339 - RNA, 22 nt, Artificial Sequence
  GATA2 Guide RNA
gcagugcuggcaugcggugggc

SEQ ID NO: 43340 - RNA, 22 nt, Artificial Sequence
  GATA2 Guide RNA
gcauauggggcugacccacacc

SEQ ID NO: 43341 - RNA, 22 nt, Artificial Sequence
  GATA2 Guide RNA
gcaugccagcacugcccagcca

SEQ ID NO: 43342 - RNA, 22 nt, Artificial Sequence
  GATA2 Guide RNA
gcaugcggugggcagagccagg

SEQ ID NO: 43343 - RNA, 22 nt, Artificial Sequence
  GATA2 Guide RNA
gccacagcguggaccagaggca

SEQ ID NO: 43344 - RNA, 22 nt, Artificial Sequence
  GATA2 Guide RNA
gccagaacccgcccuuccugga

SEQ ID NO: 43345 - RNA, 22 nt, Artificial Sequence
  GATA2 Guide RNA
gccagcacugcccagccaacug

SEQ ID NO: 43346 - RNA, 22 nt, Artificial Sequence
  GATA2 Guide RNA
gccaggaauugugcccgaccuu

SEQ ID NO: 43347 - RNA, 22 nt, Artificial Sequence
  GATA2 Guide RNA
gccagggagggugugggucagc

SEQ ID NO: 43348 - RNA, 22 nt, Artificial Sequence
  GATA2 Guide RNA
gccaguuccuuccuccagcaac

SEQ ID NO: 43349 - RNA, 22 nt, Artificial Sequence
  GATA2 Guide RNA
gccaucuggugaugggacuaug

SEQ ID NO: 43350 - RNA, 22 nt, Artificial Sequence
  GATA2 Guide RNA
gcccaccgcaugccagcacugc

SEQ ID NO: 43351 - RNA, 22 nt, Artificial Sequence
  GATA2 Guide RNA
gcccagccaacugaaguccucc

SEQ ID NO: 43352 - RNA, 22 nt, Artificial Sequence
  GATA2 Guide RNA
gccccauaugccagaacccgcc

SEQ ID NO: 43353 - RNA, 22 nt, Artificial Sequence
  GATA2 Guide RNA
gcccgaccuucauagucccauc

SEQ ID NO: 43354 - RNA, 22 nt, Artificial Sequence
  GATA2 Guide RNA
gcccucugaaaacuggugguug

SEQ ID NO: 43355 - RNA, 22 nt, Artificial Sequence
  GATA2 Guide RNA
gcccuuccuggaaugguagcca

SEQ ID NO: 43356 - RNA, 22 nt, Artificial Sequence
  GATA2 Guide RNA
gccucugguccacgcuguggcg

SEQ ID NO: 43357 - RNA, 22 nt, Artificial Sequence
  GATA2 Guide RNA
gcggggugggaggaauguugcu

SEQ ID NO: 43358 - RNA, 22 nt, Artificial Sequence
  GATA2 Guide RNA
gcggguucuggcauauggggcu

SEQ ID NO: 43359 - RNA, 22 nt, Artificial Sequence
  GATA2 Guide RNA
gcggugggcagagccagggagg

SEQ ID NO: 43360 - RNA, 22 nt, Artificial Sequence
  GATA2 Guide RNA
gcguggaccagaggcaggucaa

SEQ ID NO: 43361 - RNA, 22 nt, Artificial Sequence
  GATA2 Guide RNA
gcuaccauuccaggaagggcgg

SEQ ID NO: 43362 - RNA, 22 nt, Artificial Sequence
  GATA2 Guide RNA
gcucugcccaccgcaugccagc

SEQ ID NO: 43363 - RNA, 22 nt, Artificial Sequence
  GATA2 Guide RNA
gcugacccacacccucccuggc

SEQ ID NO: 43364 - RNA, 22 nt, Artificial Sequence
  GATA2 Guide RNA
gcugagggucccaggaagccag

SEQ ID NO: 43365 - RNA, 22 nt, Artificial Sequence
  GATA2 Guide RNA
gcuggaggaaggaacuggcccu

SEQ ID NO: 43366 - RNA, 22 nt, Artificial Sequence
  GATA2 Guide RNA
gcuggcaugcggugggcagagc

SEQ ID NO: 43367 - RNA, 22 nt, Artificial Sequence
  GATA2 Guide RNA
gcugggcagugcuggcaugcgg

SEQ ID NO: 43368 - RNA, 22 nt, Artificial Sequence
  GATA2 Guide RNA
gcuguggcggggugggaggaau

SEQ ID NO: 43369 - RNA, 22 nt, Artificial Sequence
  GATA2 Guide RNA
gcuuaaaaagggucaggguggg

SEQ ID NO: 43370 - RNA, 22 nt, Artificial Sequence
  GATA2 Guide RNA
gcuuccugggacccucagcuug

SEQ ID NO: 43371 - RNA, 22 nt, Artificial Sequence
  GATA2 Guide RNA
gcuugaccugccucugguccac

SEQ ID NO: 43372 - RNA, 22 nt, Artificial Sequence
  GATA2 Guide RNA
ggaacuggcccucugaaaacug

SEQ ID NO: 43373 - RNA, 22 nt, Artificial Sequence
  GATA2 Guide RNA
ggaagccaggaauugugcccga

SEQ ID NO: 43374 - RNA, 22 nt, Artificial Sequence
  GATA2 Guide RNA
ggaaggaacuggcccucugaaa

SEQ ID NO: 43375 - RNA, 22 nt, Artificial Sequence
  GATA2 Guide RNA
ggaagggcggguucuggcauau

SEQ ID NO: 43376 - RNA, 22 nt, Artificial Sequence
  GATA2 Guide RNA
ggaagugguuucucugcuuaaa

SEQ ID NO: 43377 - RNA, 22 nt, Artificial Sequence
  GATA2 Guide RNA
ggaaugguagccaucuggugau

SEQ ID NO: 43378 - RNA, 22 nt, Artificial Sequence
  GATA2 Guide RNA
ggaauguugcuggaggaaggaa

SEQ ID NO: 43379 - RNA, 22 nt, Artificial Sequence
  GATA2 Guide RNA
ggaauugugcccgaccuucaua

SEQ ID NO: 43380 - RNA, 22 nt, Artificial Sequence
  GATA2 Guide RNA
ggaccagaggcaggucaagcug

SEQ ID NO: 43381 - RNA, 22 nt, Artificial Sequence
  GATA2 Guide RNA
ggacccucagcuugaccugccu

SEQ ID NO: 43382 - RNA, 22 nt, Artificial Sequence
  GATA2 Guide RNA
ggacuaugaaggucgggcacaa

SEQ ID NO: 43383 - RNA, 22 nt, Artificial Sequence
  GATA2 Guide RNA
ggacuucaguuggcugggcagu

SEQ ID NO: 43384 - RNA, 22 nt, Artificial Sequence
  GATA2 Guide RNA
ggaggaaggaacuggcccucug

SEQ ID NO: 43385 - RNA, 22 nt, Artificial Sequence
  GATA2 Guide RNA
ggaggaauguugcuggaggaag

SEQ ID NO: 43386 - RNA, 22 nt, Artificial Sequence
  GATA2 Guide RNA
ggaggacuucaguuggcugggc

SEQ ID NO: 43387 - RNA, 22 nt, Artificial Sequence
  GATA2 Guide RNA
ggagggugugggucagccccau

SEQ ID NO: 43388 - RNA, 22 nt, Artificial Sequence
  GATA2 Guide RNA
ggcaaccaccaguuuucagagg

SEQ ID NO: 43389 - RNA, 22 nt, Artificial Sequence
  GATA2 Guide RNA
ggcacaauuccuggcuuccugg

SEQ ID NO: 43390 - RNA, 22 nt, Artificial Sequence
  GATA2 Guide RNA
ggcagagccagggagggugugg

SEQ ID NO: 43391 - RNA, 22 nt, Artificial Sequence
  GATA2 Guide RNA
ggcaggucaagcugaggguccc

SEQ ID NO: 43392 - RNA, 22 nt, Artificial Sequence
  GATA2 Guide RNA
ggcagugcuggcaugcgguggg

SEQ ID NO: 43393 - RNA, 22 nt, Artificial Sequence
  GATA2 Guide RNA
ggcauauggggcugacccacac

SEQ ID NO: 43394 - RNA, 22 nt, Artificial Sequence
  GATA2 Guide RNA
ggcaugcggugggcagagccag

SEQ ID NO: 43395 - RNA, 22 nt, Artificial Sequence
  GATA2 Guide RNA
ggccaguuccuuccuccagcaa

SEQ ID NO: 43396 - RNA, 22 nt, Artificial Sequence
  GATA2 Guide RNA
ggcccucugaaaacuggugguu

SEQ ID NO: 43397 - RNA, 22 nt, Artificial Sequence
  GATA2 Guide RNA
ggcggggugggaggaauguugc

SEQ ID NO: 43398 - RNA, 22 nt, Artificial Sequence
  GATA2 Guide RNA
ggcggguucuggcauauggggc

SEQ ID NO: 43399 - RNA, 22 nt, Artificial Sequence
  GATA2 Guide RNA
ggcuaccauuccaggaagggcg

SEQ ID NO: 43400 - RNA, 22 nt, Artificial Sequence
  GATA2 Guide RNA
ggcucugcccaccgcaugccag

SEQ ID NO: 43401 - RNA, 22 nt, Artificial Sequence
  GATA2 Guide RNA
ggcugacccacacccucccugg

SEQ ID NO: 43402 - RNA, 22 nt, Artificial Sequence
  GATA2 Guide RNA
ggcugggcagugcuggcaugcg

SEQ ID NO: 43403 - RNA, 22 nt, Artificial Sequence
  GATA2 Guide RNA
ggcuuccugggacccucagcuu

SEQ ID NO: 43404 - RNA, 22 nt, Artificial Sequence
  GATA2 Guide RNA
gggaagugguuucucugcuuaa

SEQ ID NO: 43405 - RNA, 22 nt, Artificial Sequence
  GATA2 Guide RNA
gggacccucagcuugaccugcc

SEQ ID NO: 43406 - RNA, 22 nt, Artificial Sequence
  GATA2 Guide RNA
gggacuaugaaggucgggcaca

SEQ ID NO: 43407 - RNA, 22 nt, Artificial Sequence
  GATA2 Guide RNA
gggaggaauguugcuggaggaa

SEQ ID NO: 43408 - RNA, 22 nt, Artificial Sequence
  GATA2 Guide RNA
gggaggacuucaguuggcuggg

SEQ ID NO: 43409 - RNA, 22 nt, Artificial Sequence
  GATA2 Guide RNA
gggagggugugggucagcccca

SEQ ID NO: 43410 - RNA, 22 nt, Artificial Sequence
  GATA2 Guide RNA
gggcacaauuccuggcuuccug

SEQ ID NO: 43411 - RNA, 22 nt, Artificial Sequence
  GATA2 Guide RNA
gggcagagccagggagggugug

SEQ ID NO: 43412 - RNA, 22 nt, Artificial Sequence
  GATA2 Guide RNA
gggcagugcuggcaugcggugg

SEQ ID NO: 43413 - RNA, 22 nt, Artificial Sequence
  GATA2 Guide RNA
gggccaguuccuuccuccagca

SEQ ID NO: 43414 - RNA, 22 nt, Artificial Sequence
  GATA2 Guide RNA
gggcggguucuggcauaugggg

SEQ ID NO: 43415 - RNA, 22 nt, Artificial Sequence
  GATA2 Guide RNA
gggcugacccacacccucccug

SEQ ID NO: 43416 - RNA, 22 nt, Artificial Sequence
  GATA2 Guide RNA
ggggaggacuucaguuggcugg

SEQ ID NO: 43417 - RNA, 22 nt, Artificial Sequence
  GATA2 Guide RNA
ggggcugacccacacccucccu

SEQ ID NO: 43418 - RNA, 22 nt, Artificial Sequence
  GATA2 Guide RNA
gggggaggacuucaguuggcug

SEQ ID NO: 43419 - RNA, 22 nt, Artificial Sequence
  GATA2 Guide RNA
ggggggaggacuucaguuggcu

SEQ ID NO: 43420 - RNA, 22 nt, Artificial Sequence
  GATA2 Guide RNA
ggggugggaggaauguugcugg

SEQ ID NO: 43421 - RNA, 22 nt, Artificial Sequence
  GATA2 Guide RNA
gggucagccccauaugccagaa

SEQ ID NO: 43422 - RNA, 22 nt, Artificial Sequence
  GATA2 Guide RNA
gggucccaggaagccaggaauu

SEQ ID NO: 43423 - RNA, 22 nt, Artificial Sequence
  GATA2 Guide RNA
gggugggaggaauguugcugga

SEQ ID NO: 43424 - RNA, 22 nt, Artificial Sequence
  GATA2 Guide RNA
gggugugggucagccccauaug

SEQ ID NO: 43425 - RNA, 22 nt, Artificial Sequence
  GATA2 Guide RNA
ggguucuggcauauggggcuga

SEQ ID NO: 43426 - RNA, 22 nt, Artificial Sequence
  GATA2 Guide RNA
gguagccaucuggugaugggac

SEQ ID NO: 43427 - RNA, 22 nt, Artificial Sequence
  GATA2 Guide RNA
ggucaagcugagggucccagga

SEQ ID NO: 43428 - RNA, 22 nt, Artificial Sequence
  GATA2 Guide RNA
ggucagccccauaugccagaac

SEQ ID NO: 43429 - RNA, 22 nt, Artificial Sequence
  GATA2 Guide RNA
gguccacgcuguggcggggugg

SEQ ID NO: 43430 - RNA, 22 nt, Artificial Sequence
  GATA2 Guide RNA
ggucccaggaagccaggaauug

SEQ ID NO: 43431 - RNA, 22 nt, Artificial Sequence
  GATA2 Guide RNA
ggucgggcacaauuccuggcuu

SEQ ID NO: 43432 - RNA, 22 nt, Artificial Sequence
  GATA2 Guide RNA
ggugaugggacuaugaaggucg

SEQ ID NO: 43433 - RNA, 22 nt, Artificial Sequence
  GATA2 Guide RNA
ggugggaggaauguugcuggag

SEQ ID NO: 43434 - RNA, 22 nt, Artificial Sequence
  GATA2 Guide RNA
ggugggcagagccagggagggu

SEQ ID NO: 43435 - RNA, 22 nt, Artificial Sequence
  GATA2 Guide RNA
ggugugggucagccccauaugc

SEQ ID NO: 43436 - RNA, 22 nt, Artificial Sequence
  GATA2 Guide RNA
gguucuggcauauggggcugac

SEQ ID NO: 43437 - RNA, 22 nt, Artificial Sequence
  GATA2 Guide RNA
gguuucucugcuuaaaaagggu

SEQ ID NO: 43438 - RNA, 22 nt, Artificial Sequence
  GATA2 Guide RNA
guagccaucuggugaugggacu

SEQ ID NO: 43439 - RNA, 22 nt, Artificial Sequence
  GATA2 Guide RNA
gucaagcugagggucccaggaa

SEQ ID NO: 43440 - RNA, 22 nt, Artificial Sequence
  GATA2 Guide RNA
gucagccccauaugccagaacc

SEQ ID NO: 43441 - RNA, 22 nt, Artificial Sequence
  GATA2 Guide RNA
guccacgcuguggcgggguggg

SEQ ID NO: 43442 - RNA, 22 nt, Artificial Sequence
  GATA2 Guide RNA
gucccaggaagccaggaauugu

SEQ ID NO: 43443 - RNA, 22 nt, Artificial Sequence
  GATA2 Guide RNA
gucccaucaccagauggcuacc

SEQ ID NO: 43444 - RNA, 22 nt, Artificial Sequence
  GATA2 Guide RNA
gucgggcacaauuccuggcuuc

SEQ ID NO: 43445 - RNA, 22 nt, Artificial Sequence
  GATA2 Guide RNA
gugaugggacuaugaaggucgg

SEQ ID NO: 43446 - RNA, 22 nt, Artificial Sequence
  GATA2 Guide RNA
gugcccgaccuucauaguccca

SEQ ID NO: 43447 - RNA, 22 nt, Artificial Sequence
  GATA2 Guide RNA
gugcuggcaugcggugggcaga

SEQ ID NO: 43448 - RNA, 22 nt, Artificial Sequence
  GATA2 Guide RNA
guggaccagaggcaggucaagc

SEQ ID NO: 43449 - RNA, 22 nt, Artificial Sequence
  GATA2 Guide RNA
guggcggggugggaggaauguu

SEQ ID NO: 43450 - RNA, 22 nt, Artificial Sequence
  GATA2 Guide RNA
gugggaggaauguugcuggagg

SEQ ID NO: 43451 - RNA, 22 nt, Artificial Sequence
  GATA2 Guide RNA
gugggcagagccagggagggug

SEQ ID NO: 43452 - RNA, 22 nt, Artificial Sequence
  GATA2 Guide RNA
gugggucagccccauaugccag

SEQ ID NO: 43453 - RNA, 22 nt, Artificial Sequence
  GATA2 Guide RNA
gugguuucucugcuuaaaaagg

SEQ ID NO: 43454 - RNA, 22 nt, Artificial Sequence
  GATA2 Guide RNA
gugugggucagccccauaugcc

SEQ ID NO: 43455 - RNA, 22 nt, Artificial Sequence
  GATA2 Guide RNA
guuccuuccuccagcaacauuc

SEQ ID NO: 43456 - RNA, 22 nt, Artificial Sequence
  GATA2 Guide RNA
guucuggcauauggggcugacc

SEQ ID NO: 43457 - RNA, 22 nt, Artificial Sequence
  GATA2 Guide RNA
guugcuggaggaaggaacuggc

SEQ ID NO: 43458 - RNA, 22 nt, Artificial Sequence
  GATA2 Guide RNA
guuggcugggcagugcuggcau

SEQ ID NO: 43459 - RNA, 22 nt, Artificial Sequence
  GATA2 Guide RNA
guuucucugcuuaaaaaggguc

SEQ ID NO: 43460 - RNA, 22 nt, Artificial Sequence
  GATA2 Guide RNA
guuuucagagggccaguuccuu

SEQ ID NO: 43461 - RNA, 22 nt, Artificial Sequence
  GATA2 Guide RNA
uaaaaagggucagggugggggg

SEQ ID NO: 43462 - RNA, 22 nt, Artificial Sequence
  GATA2 Guide RNA
uaccauuccaggaagggcgggu

SEQ ID NO: 43463 - RNA, 22 nt, Artificial Sequence
  GATA2 Guide RNA
uagaggcaaccaccaguuuuca

SEQ ID NO: 43464 - RNA, 22 nt, Artificial Sequence
  GATA2 Guide RNA
uagccaucuggugaugggacua

SEQ ID NO: 43465 - RNA, 22 nt, Artificial Sequence
  GATA2 Guide RNA
uagggaagugguuucucugcuu

SEQ ID NO: 43466 - RNA, 22 nt, Artificial Sequence
  GATA2 Guide RNA
uagucccaucaccagauggcua

SEQ ID NO: 43467 - RNA, 22 nt, Artificial Sequence
  GATA2 Guide RNA
uaugaaggucgggcacaauucc

SEQ ID NO: 43468 - RNA, 22 nt, Artificial Sequence
  GATA2 Guide RNA
uaugccagaacccgcccuuccu

SEQ ID NO: 43469 - RNA, 22 nt, Artificial Sequence
  GATA2 Guide RNA
uauggggcugacccacacccuc

SEQ ID NO: 43470 - RNA, 22 nt, Artificial Sequence
  GATA2 Guide RNA
ucaagcugagggucccaggaag

SEQ ID NO: 43471 - RNA, 22 nt, Artificial Sequence
  GATA2 Guide RNA
ucaccagauggcuaccauucca

SEQ ID NO: 43472 - RNA, 22 nt, Artificial Sequence
  GATA2 Guide RNA
ucagagggccaguuccuuccuc

SEQ ID NO: 43473 - RNA, 22 nt, Artificial Sequence
  GATA2 Guide RNA
ucagccccauaugccagaaccc

SEQ ID NO: 43474 - RNA, 22 nt, Artificial Sequence
  GATA2 Guide RNA
ucagcuugaccugccucugguc

SEQ ID NO: 43475 - RNA, 22 nt, Artificial Sequence
  GATA2 Guide RNA
ucaguuggcugggcagugcugg

SEQ ID NO: 43476 - RNA, 22 nt, Artificial Sequence
  GATA2 Guide RNA
ucauagucccaucaccagaugg

SEQ ID NO: 43477 - RNA, 22 nt, Artificial Sequence
  GATA2 Guide RNA
uccacgcuguggcgggguggga

SEQ ID NO: 43478 - RNA, 22 nt, Artificial Sequence
  GATA2 Guide RNA
uccagcaacauuccucccaccc

SEQ ID NO: 43479 - RNA, 22 nt, Artificial Sequence
  GATA2 Guide RNA
uccaggaagggcggguucuggc

SEQ ID NO: 43480 - RNA, 22 nt, Artificial Sequence
  GATA2 Guide RNA
ucccaccccgccacagcgugga

SEQ ID NO: 43481 - RNA, 22 nt, Artificial Sequence
  GATA2 Guide RNA
ucccaggaagccaggaauugug

SEQ ID NO: 43482 - RNA, 22 nt, Artificial Sequence
  GATA2 Guide RNA
ucccaucaccagauggcuacca

SEQ ID NO: 43483 - RNA, 22 nt, Artificial Sequence
  GATA2 Guide RNA
ucccuggcucugcccaccgcau

SEQ ID NO: 43484 - RNA, 22 nt, Artificial Sequence
  GATA2 Guide RNA
uccuccagcaacauuccuccca

SEQ ID NO: 43485 - RNA, 22 nt, Artificial Sequence
  GATA2 Guide RNA
uccucccaccccgccacagcgu

SEQ ID NO: 43486 - RNA, 22 nt, Artificial Sequence
  GATA2 Guide RNA
uccuggaaugguagccaucugg

SEQ ID NO: 43487 - RNA, 22 nt, Artificial Sequence
  GATA2 Guide RNA
uccuggcuuccugggacccuca

SEQ ID NO: 43488 - RNA, 22 nt, Artificial Sequence
  GATA2 Guide RNA
uccugggacccucagcuugacc

SEQ ID NO: 43489 - RNA, 22 nt, Artificial Sequence
  GATA2 Guide RNA
uccuuccuccagcaacauuccu

SEQ ID NO: 43490 - RNA, 22 nt, Artificial Sequence
  GATA2 Guide RNA
ucgggcacaauuccuggcuucc

SEQ ID NO: 43491 - RNA, 22 nt, Artificial Sequence
  GATA2 Guide RNA
ucucugcuuaaaaagggucagg

SEQ ID NO: 43492 - RNA, 22 nt, Artificial Sequence
  GATA2 Guide RNA
ucugcccaccgcaugccagcac

SEQ ID NO: 43493 - RNA, 22 nt, Artificial Sequence
  GATA2 Guide RNA
ucugcuuaaaaagggucagggu

SEQ ID NO: 43494 - RNA, 22 nt, Artificial Sequence
  GATA2 Guide RNA
ucuggcauauggggcugaccca

SEQ ID NO: 43495 - RNA, 22 nt, Artificial Sequence
  GATA2 Guide RNA
ucugguccacgcuguggcgggg

SEQ ID NO: 43496 - RNA, 22 nt, Artificial Sequence
  GATA2 Guide RNA
ucuggugaugggacuaugaagg

SEQ ID NO: 43497 - RNA, 22 nt, Artificial Sequence
  GATA2 Guide RNA
ugaaggucgggcacaauuccug

SEQ ID NO: 43498 - RNA, 22 nt, Artificial Sequence
  GATA2 Guide RNA
ugacccacacccucccuggcuc

SEQ ID NO: 43499 - RNA, 22 nt, Artificial Sequence
  GATA2 Guide RNA
ugacccuuuuuaagcagagaaa

SEQ ID NO: 43500 - RNA, 22 nt, Artificial Sequence
  GATA2 Guide RNA
ugaccugccucugguccacgcu

SEQ ID NO: 43501 - RNA, 22 nt, Artificial Sequence
  GATA2 Guide RNA
ugagggucccaggaagccagga

SEQ ID NO: 43502 - RNA, 22 nt, Artificial Sequence
  GATA2 Guide RNA
ugaugggacuaugaaggucggg

SEQ ID NO: 43503 - RNA, 22 nt, Artificial Sequence
  GATA2 Guide RNA
ugccagaacccgcccuuccugg

SEQ ID NO: 43504 - RNA, 22 nt, Artificial Sequence
  GATA2 Guide RNA
ugccagcacugcccagccaacu

SEQ ID NO: 43505 - RNA, 22 nt, Artificial Sequence
  GATA2 Guide RNA
ugcccaccgcaugccagcacug

SEQ ID NO: 43506 - RNA, 22 nt, Artificial Sequence
  GATA2 Guide RNA
ugcccagccaacugaaguccuc

SEQ ID NO: 43507 - RNA, 22 nt, Artificial Sequence
  GATA2 Guide RNA
ugcccgaccuucauagucccau

SEQ ID NO: 43508 - RNA, 22 nt, Artificial Sequence
  GATA2 Guide RNA
ugccucugguccacgcuguggc

SEQ ID NO: 43509 - RNA, 22 nt, Artificial Sequence
  GATA2 Guide RNA
ugcggugggcagagccagggag

SEQ ID NO: 43510 - RNA, 22 nt, Artificial Sequence
  GATA2 Guide RNA
ugcuggaggaaggaacuggccc

SEQ ID NO: 43511 - RNA, 22 nt, Artificial Sequence
  GATA2 Guide RNA
ugcuggcaugcggugggcagag

SEQ ID NO: 43512 - RNA, 22 nt, Artificial Sequence
  GATA2 Guide RNA
ugcuuaaaaagggucagggugg

SEQ ID NO: 43513 - RNA, 22 nt, Artificial Sequence
  GATA2 Guide RNA
uggaaugguagccaucugguga

SEQ ID NO: 43514 - RNA, 22 nt, Artificial Sequence
  GATA2 Guide RNA
uggaccagaggcaggucaagcu

SEQ ID NO: 43515 - RNA, 22 nt, Artificial Sequence
  GATA2 Guide RNA
uggaggaaggaacuggcccucu

SEQ ID NO: 43516 - RNA, 22 nt, Artificial Sequence
  GATA2 Guide RNA
uggcauauggggcugacccaca

SEQ ID NO: 43517 - RNA, 22 nt, Artificial Sequence
  GATA2 Guide RNA
uggcaugcggugggcagagcca

SEQ ID NO: 43518 - RNA, 22 nt, Artificial Sequence
  GATA2 Guide RNA
uggcccucugaaaacugguggu

SEQ ID NO: 43519 - RNA, 22 nt, Artificial Sequence
  GATA2 Guide RNA
uggcggggugggaggaauguug

SEQ ID NO: 43520 - RNA, 22 nt, Artificial Sequence
  GATA2 Guide RNA
uggcuaccauuccaggaagggc

SEQ ID NO: 43521 - RNA, 22 nt, Artificial Sequence
  GATA2 Guide RNA
uggcucugcccaccgcaugcca

SEQ ID NO: 43522 - RNA, 22 nt, Artificial Sequence
  GATA2 Guide RNA
uggcugggcagugcuggcaugc

SEQ ID NO: 43523 - RNA, 22 nt, Artificial Sequence
  GATA2 Guide RNA
uggcuuccugggacccucagcu

SEQ ID NO: 43524 - RNA, 22 nt, Artificial Sequence
  GATA2 Guide RNA
ugggacccucagcuugaccugc

SEQ ID NO: 43525 - RNA, 22 nt, Artificial Sequence
  GATA2 Guide RNA
ugggacuaugaaggucgggcac

SEQ ID NO: 43526 - RNA, 22 nt, Artificial Sequence
  GATA2 Guide RNA
ugggaggaauguugcuggagga

SEQ ID NO: 43527 - RNA, 22 nt, Artificial Sequence
  GATA2 Guide RNA
ugggcagagccagggagggugu

SEQ ID NO: 43528 - RNA, 22 nt, Artificial Sequence
  GATA2 Guide RNA
ugggcagugcuggcaugcggug

SEQ ID NO: 43529 - RNA, 22 nt, Artificial Sequence
  GATA2 Guide RNA
uggggcugacccacacccuccc

SEQ ID NO: 43530 - RNA, 22 nt, Artificial Sequence
  GATA2 Guide RNA
ugggucagccccauaugccaga

SEQ ID NO: 43531 - RNA, 22 nt, Artificial Sequence
  GATA2 Guide RNA
ugguagccaucuggugauggga

SEQ ID NO: 43532 - RNA, 22 nt, Artificial Sequence
  GATA2 Guide RNA
ugguccacgcuguggcggggug

SEQ ID NO: 43533 - RNA, 22 nt, Artificial Sequence
  GATA2 Guide RNA
uggugaugggacuaugaagguc

SEQ ID NO: 43534 - RNA, 22 nt, Artificial Sequence
  GATA2 Guide RNA
ugguuucucugcuuaaaaaggg

SEQ ID NO: 43535 - RNA, 22 nt, Artificial Sequence
  GATA2 Guide RNA
ugugcccgaccuucauaguccc

SEQ ID NO: 43536 - RNA, 22 nt, Artificial Sequence
  GATA2 Guide RNA
uguggcggggugggaggaaugu

SEQ ID NO: 43537 - RNA, 22 nt, Artificial Sequence
  GATA2 Guide RNA
ugugggucagccccauaugcca

SEQ ID NO: 43538 - RNA, 22 nt, Artificial Sequence
  GATA2 Guide RNA
uguugcuggaggaaggaacugg

SEQ ID NO: 43539 - RNA, 22 nt, Artificial Sequence
  GATA2 Guide RNA
uuaaaaagggucaggguggggg

SEQ ID NO: 43540 - RNA, 22 nt, Artificial Sequence
  GATA2 Guide RNA
uuaagcagagaaaccacuuccc

SEQ ID NO: 43541 - RNA, 22 nt, Artificial Sequence
  GATA2 Guide RNA
uucagagggccaguuccuuccu

SEQ ID NO: 43542 - RNA, 22 nt, Artificial Sequence
  GATA2 Guide RNA
uucaguuggcugggcagugcug

SEQ ID NO: 43543 - RNA, 22 nt, Artificial Sequence
  GATA2 Guide RNA
uucauagucccaucaccagaug

SEQ ID NO: 43544 - RNA, 22 nt, Artificial Sequence
  GATA2 Guide RNA
uuccaggaagggcggguucugg

SEQ ID NO: 43545 - RNA, 22 nt, Artificial Sequence
  GATA2 Guide RNA
uuccuccagcaacauuccuccc

SEQ ID NO: 43546 - RNA, 22 nt, Artificial Sequence
  GATA2 Guide RNA
uuccucccaccccgccacagcg

SEQ ID NO: 43547 - RNA, 22 nt, Artificial Sequence
  GATA2 Guide RNA
uuccuggaaugguagccaucug

SEQ ID NO: 43548 - RNA, 22 nt, Artificial Sequence
  GATA2 Guide RNA
uuccuggcuuccugggacccuc

SEQ ID NO: 43549 - RNA, 22 nt, Artificial Sequence
  GATA2 Guide RNA
uuccugggacccucagcuugac

SEQ ID NO: 43550 - RNA, 22 nt, Artificial Sequence
  GATA2 Guide RNA
uuccuuccuccagcaacauucc

SEQ ID NO: 43551 - RNA, 22 nt, Artificial Sequence
  GATA2 Guide RNA
uucucugcuuaaaaagggucag

SEQ ID NO: 43552 - RNA, 22 nt, Artificial Sequence
  GATA2 Guide RNA
uucuggcauauggggcugaccc

SEQ ID NO: 43553 - RNA, 22 nt, Artificial Sequence
  GATA2 Guide RNA
uugaccugccucugguccacgc

SEQ ID NO: 43554 - RNA, 22 nt, Artificial Sequence
  GATA2 Guide RNA
uugcuggaggaaggaacuggcc

SEQ ID NO: 43555 - RNA, 22 nt, Artificial Sequence
  GATA2 Guide RNA
uuggcugggcagugcuggcaug

SEQ ID NO: 43556 - RNA, 22 nt, Artificial Sequence
  GATA2 Guide RNA
uugugcccgaccuucauagucc

SEQ ID NO: 43557 - RNA, 22 nt, Artificial Sequence
  GATA2 Guide RNA
uuuaagcagagaaaccacuucc

SEQ ID NO: 43558 - RNA, 22 nt, Artificial Sequence
  GATA2 Guide RNA
uuucagagggccaguuccuucc

SEQ ID NO: 43559 - RNA, 22 nt, Artificial Sequence
  GATA2 Guide RNA
uuucucugcuuaaaaaggguca

SEQ ID NO: 43560 - RNA, 22 nt, Artificial Sequence
  GATA2 Guide RNA
uuuuaagcagagaaaccacuuc

SEQ ID NO: 43561 - RNA, 22 nt, Artificial Sequence
  GATA2 Guide RNA
uuuucagagggccaguuccuuc

SEQ ID NO: 43562 - RNA, 22 nt, Artificial Sequence
  GATA2 Guide RNA
uuuuuaagcagagaaaccacuu

SEQ ID NO: 43563 - RNA, 20 nt, Artificial Sequence
  GATA2 Guide RNA
aaagcgcagagguccccugg

SEQ ID NO: 43564 - RNA, 20 nt, Artificial Sequence
  GATA2 Guide RNA
aagaggccccagccacaaua

SEQ ID NO: 43565 - RNA, 20 nt, Artificial Sequence
  GATA2 Guide RNA
aagaggggugccuugccucu

SEQ ID NO: 43566 - RNA, 20 nt, Artificial Sequence
  GATA2 Guide RNA
aagccaagccaagcuggaua

SEQ ID NO: 43567 - RNA, 20 nt, Artificial Sequence
  GATA2 Guide RNA
aagccaagcuggauauugug

SEQ ID NO: 43568 - RNA, 20 nt, Artificial Sequence
  GATA2 Guide RNA
aagcgcagagguccccuggg

SEQ ID NO: 43569 - RNA, 20 nt, Artificial Sequence
  GATA2 Guide RNA
aagcuggauauuguggcugg

SEQ ID NO: 43570 - RNA, 20 nt, Artificial Sequence
  GATA2 Guide RNA
aaggcaccccucuuacggga

SEQ ID NO: 43571 - RNA, 20 nt, Artificial Sequence
  GATA2 Guide RNA
aagggcuucccguaagaggg

SEQ ID NO: 43572 - RNA, 20 nt, Artificial Sequence
  GATA2 Guide RNA
aauauccagcuuggcuuggc

SEQ ID NO: 43573 - RNA, 20 nt, Artificial Sequence
  GATA2 Guide RNA
acaaagcgcagagguccccu

SEQ ID NO: 43574 - RNA, 20 nt, Artificial Sequence
  GATA2 Guide RNA
acaauauccagcuuggcuug

SEQ ID NO: 43575 - RNA, 20 nt, Artificial Sequence
  GATA2 Guide RNA
accccgccccucccagggga

SEQ ID NO: 43576 - RNA, 20 nt, Artificial Sequence
  GATA2 Guide RNA
accccucuuacgggaagccc

SEQ ID NO: 43577 - RNA, 20 nt, Artificial Sequence
  GATA2 Guide RNA
acccuguccuagccagcucc

SEQ ID NO: 43578 - RNA, 20 nt, Artificial Sequence
  GATA2 Guide RNA
accuccugagcagaggcaag

SEQ ID NO: 43579 - RNA, 20 nt, Artificial Sequence
  GATA2 Guide RNA
accucugcgcuuugugcugc

SEQ ID NO: 43580 - RNA, 20 nt, Artificial Sequence
  GATA2 Guide RNA
acucagggcagcagcuuccc

SEQ ID NO: 43581 - RNA, 20 nt, Artificial Sequence
  GATA2 Guide RNA
agaagggcuucccguaagag

SEQ ID NO: 43582 - RNA, 20 nt, Artificial Sequence
  GATA2 Guide RNA
agacccuguccuagccagcu

SEQ ID NO: 43583 - RNA, 20 nt, Artificial Sequence
  GATA2 Guide RNA
agaggcaaggcaccccucuu

SEQ ID NO: 43584 - RNA, 20 nt, Artificial Sequence
  GATA2 Guide RNA
agaggccccagccacaauau

SEQ ID NO: 43585 - RNA, 20 nt, Artificial Sequence
  GATA2 Guide RNA
agaggggugccuugccucug

SEQ ID NO: 43586 - RNA, 20 nt, Artificial Sequence
  GATA2 Guide RNA
agagguccccugggaggggc

SEQ ID NO: 43587 - RNA, 20 nt, Artificial Sequence
  GATA2 Guide RNA
agcacaaagcgcagaggucc

SEQ ID NO: 43588 - RNA, 20 nt, Artificial Sequence
  GATA2 Guide RNA
agcagaggcaaggcaccccu

SEQ ID NO: 43589 - RNA, 20 nt, Artificial Sequence
  GATA2 Guide RNA
agcagcuucccaagccaagc

SEQ ID NO: 43590 - RNA, 20 nt, Artificial Sequence
  GATA2 Guide RNA
agccaagccaagcuggauau

SEQ ID NO: 43591 - RNA, 20 nt, Artificial Sequence
  GATA2 Guide RNA
agccaagcuggauauugugg

SEQ ID NO: 43592 - RNA, 20 nt, Artificial Sequence
  GATA2 Guide RNA
agccacaauauccagcuugg

SEQ ID NO: 43593 - RNA, 20 nt, Artificial Sequence
  GATA2 Guide RNA
agccagcuccaccuccugag

SEQ ID NO: 43594 - RNA, 20 nt, Artificial Sequence
  GATA2 Guide RNA
agcgcagagguccccuggga

SEQ ID NO: 43595 - RNA, 20 nt, Artificial Sequence
  GATA2 Guide RNA
agcuccaccuccugagcaga

SEQ ID NO: 43596 - RNA, 20 nt, Artificial Sequence
  GATA2 Guide RNA
agcuggauauuguggcuggg

SEQ ID NO: 43597 - RNA, 20 nt, Artificial Sequence
  GATA2 Guide RNA
agcuucccaagccaagccaa

SEQ ID NO: 43598 - RNA, 20 nt, Artificial Sequence
  GATA2 Guide RNA
agcuuggcuuggcuugggaa

SEQ ID NO: 43599 - RNA, 20 nt, Artificial Sequence
  GATA2 Guide RNA
aggagguggagcuggcuagg

SEQ ID NO: 43600 - RNA, 20 nt, Artificial Sequence
  GATA2 Guide RNA
aggcaagaggccccagccac

SEQ ID NO: 43601 - RNA, 20 nt, Artificial Sequence
  GATA2 Guide RNA
aggcaaggcaccccucuuac

SEQ ID NO: 43602 - RNA, 20 nt, Artificial Sequence
  GATA2 Guide RNA
aggcaccccucuuacgggaa

SEQ ID NO: 43603 - RNA, 20 nt, Artificial Sequence
  GATA2 Guide RNA
aggccccagccacaauaucc

SEQ ID NO: 43604 - RNA, 20 nt, Artificial Sequence
  GATA2 Guide RNA
agggcagcagcuucccaagc

SEQ ID NO: 43605 - RNA, 20 nt, Artificial Sequence
  GATA2 Guide RNA
agggcuucccguaagagggg

SEQ ID NO: 43606 - RNA, 20 nt, Artificial Sequence
  GATA2 Guide RNA
aggggaccucugcgcuuugu

SEQ ID NO: 43607 - RNA, 20 nt, Artificial Sequence
  GATA2 Guide RNA
aggggugccuugccucugcu

SEQ ID NO: 43608 - RNA, 20 nt, Artificial Sequence
  GATA2 Guide RNA
agguccccugggaggggcgg

SEQ ID NO: 43609 - RNA, 20 nt, Artificial Sequence
  GATA2 Guide RNA
agguggagcuggcuaggaca

SEQ ID NO: 43610 - RNA, 20 nt, Artificial Sequence
  GATA2 Guide RNA
auauccagcuuggcuuggcu

SEQ ID NO: 43611 - RNA, 20 nt, Artificial Sequence
  GATA2 Guide RNA
auauuguggcuggggccucu

SEQ ID NO: 43612 - RNA, 20 nt, Artificial Sequence
  GATA2 Guide RNA
auccagcuuggcuuggcuug

SEQ ID NO: 43613 - RNA, 20 nt, Artificial Sequence
  GATA2 Guide RNA
auuguggcuggggccucuug

SEQ ID NO: 43614 - RNA, 20 nt, Artificial Sequence
  GATA2 Guide RNA
caaagcgcagagguccccug

SEQ ID NO: 43615 - RNA, 20 nt, Artificial Sequence
  GATA2 Guide RNA
caagaggccccagccacaau

SEQ ID NO: 43616 - RNA, 20 nt, Artificial Sequence
  GATA2 Guide RNA
caagccaagccaagcuggau

SEQ ID NO: 43617 - RNA, 20 nt, Artificial Sequence
  GATA2 Guide RNA
caagccaagcuggauauugu

SEQ ID NO: 43618 - RNA, 20 nt, Artificial Sequence
  GATA2 Guide RNA
caagcuggauauuguggcug

SEQ ID NO: 43619 - RNA, 20 nt, Artificial Sequence
  GATA2 Guide RNA
caaggcaccccucuuacggg

SEQ ID NO: 43620 - RNA, 20 nt, Artificial Sequence
  GATA2 Guide RNA
caauauccagcuuggcuugg

SEQ ID NO: 43621 - RNA, 20 nt, Artificial Sequence
  GATA2 Guide RNA
cacaaagcgcagaggucccc

SEQ ID NO: 43622 - RNA, 20 nt, Artificial Sequence
  GATA2 Guide RNA
cacaauauccagcuuggcuu

SEQ ID NO: 43623 - RNA, 20 nt, Artificial Sequence
  GATA2 Guide RNA
caccccucuuacgggaagcc

SEQ ID NO: 43624 - RNA, 20 nt, Artificial Sequence
  GATA2 Guide RNA
caccuccugagcagaggcaa

SEQ ID NO: 43625 - RNA, 20 nt, Artificial Sequence
  GATA2 Guide RNA
cacucagggcagcagcuucc

SEQ ID NO: 43626 - RNA, 20 nt, Artificial Sequence
  GATA2 Guide RNA
cagaagggcuucccguaaga

SEQ ID NO: 43627 - RNA, 20 nt, Artificial Sequence
  GATA2 Guide RNA
cagaggcaaggcaccccucu

SEQ ID NO: 43628 - RNA, 20 nt, Artificial Sequence
  GATA2 Guide RNA
cagagguccccugggagggg

SEQ ID NO: 43629 - RNA, 20 nt, Artificial Sequence
  GATA2 Guide RNA
cagcacaaagcgcagagguc

SEQ ID NO: 43630 - RNA, 20 nt, Artificial Sequence
  GATA2 Guide RNA
cagcagcuucccaagccaag

SEQ ID NO: 43631 - RNA, 20 nt, Artificial Sequence
  GATA2 Guide RNA
cagccacaauauccagcuug

SEQ ID NO: 43632 - RNA, 20 nt, Artificial Sequence
  GATA2 Guide RNA
cagcuccaccuccugagcag

SEQ ID NO: 43633 - RNA, 20 nt, Artificial Sequence
  GATA2 Guide RNA
cagcuucccaagccaagcca

SEQ ID NO: 43634 - RNA, 20 nt, Artificial Sequence
  GATA2 Guide RNA
cagcuuggcuuggcuuggga

SEQ ID NO: 43635 - RNA, 20 nt, Artificial Sequence
  GATA2 Guide RNA
caggagguggagcuggcuag

SEQ ID NO: 43636 - RNA, 20 nt, Artificial Sequence
  GATA2 Guide RNA
caggcaagaggccccagcca

SEQ ID NO: 43637 - RNA, 20 nt, Artificial Sequence
  GATA2 Guide RNA
cagggcagcagcuucccaag

SEQ ID NO: 43638 - RNA, 20 nt, Artificial Sequence
  GATA2 Guide RNA
caggggaccucugcgcuuug

SEQ ID NO: 43639 - RNA, 20 nt, Artificial Sequence
  GATA2 Guide RNA
ccaagccaagccaagcugga

SEQ ID NO: 43640 - RNA, 20 nt, Artificial Sequence
  GATA2 Guide RNA
ccaagccaagcuggauauug

SEQ ID NO: 43641 - RNA, 20 nt, Artificial Sequence
  GATA2 Guide RNA
ccaagcuggauauuguggcu

SEQ ID NO: 43642 - RNA, 20 nt, Artificial Sequence
  GATA2 Guide RNA
ccacaauauccagcuuggcu

SEQ ID NO: 43643 - RNA, 20 nt, Artificial Sequence
  GATA2 Guide RNA
ccaccuccugagcagaggca

SEQ ID NO: 43644 - RNA, 20 nt, Artificial Sequence
  GATA2 Guide RNA
ccagaagggcuucccguaag

SEQ ID NO: 43645 - RNA, 20 nt, Artificial Sequence
  GATA2 Guide RNA
ccagccacaauauccagcuu

SEQ ID NO: 43646 - RNA, 20 nt, Artificial Sequence
  GATA2 Guide RNA
ccagcuccaccuccugagca

SEQ ID NO: 43647 - RNA, 20 nt, Artificial Sequence
  GATA2 Guide RNA
ccagcuuggcuuggcuuggg

SEQ ID NO: 43648 - RNA, 20 nt, Artificial Sequence
  GATA2 Guide RNA
ccaggcaagaggccccagcc

SEQ ID NO: 43649 - RNA, 20 nt, Artificial Sequence
  GATA2 Guide RNA
ccaggggaccucugcgcuuu

SEQ ID NO: 43650 - RNA, 20 nt, Artificial Sequence
  GATA2 Guide RNA
cccaagccaagccaagcugg

SEQ ID NO: 43651 - RNA, 20 nt, Artificial Sequence
  GATA2 Guide RNA
cccagccacaauauccagcu

SEQ ID NO: 43652 - RNA, 20 nt, Artificial Sequence
  GATA2 Guide RNA
cccaggggaccucugcgcuu

SEQ ID NO: 43653 - RNA, 20 nt, Artificial Sequence
  GATA2 Guide RNA
ccccagccacaauauccagc

SEQ ID NO: 43654 - RNA, 20 nt, Artificial Sequence
  GATA2 Guide RNA
ccccucccaggggaccucug

SEQ ID NO: 43655 - RNA, 20 nt, Artificial Sequence
  GATA2 Guide RNA
ccccucuuacgggaagcccu

SEQ ID NO: 43656 - RNA, 20 nt, Artificial Sequence
  GATA2 Guide RNA
cccguaagaggggugccuug

SEQ ID NO: 43657 - RNA, 20 nt, Artificial Sequence
  GATA2 Guide RNA
cccucccaggggaccucugc

SEQ ID NO: 43658 - RNA, 20 nt, Artificial Sequence
  GATA2 Guide RNA
cccucuuacgggaagcccuu

SEQ ID NO: 43659 - RNA, 20 nt, Artificial Sequence
  GATA2 Guide RNA
cccuguccuagccagcucca

SEQ ID NO: 43660 - RNA, 20 nt, Artificial Sequence
  GATA2 Guide RNA
ccgagacccuguccuagcca

SEQ ID NO: 43661 - RNA, 20 nt, Artificial Sequence
  GATA2 Guide RNA
ccgccccucccaggggaccu

SEQ ID NO: 43662 - RNA, 20 nt, Artificial Sequence
  GATA2 Guide RNA
ccguaagaggggugccuugc

SEQ ID NO: 43663 - RNA, 20 nt, Artificial Sequence
  GATA2 Guide RNA
ccuagccagcuccaccuccu

SEQ ID NO: 43664 - RNA, 20 nt, Artificial Sequence
  GATA2 Guide RNA
ccucccaggggaccucugcg

SEQ ID NO: 43665 - RNA, 20 nt, Artificial Sequence
  GATA2 Guide RNA
ccuccugagcagaggcaagg

SEQ ID NO: 43666 - RNA, 20 nt, Artificial Sequence
  GATA2 Guide RNA
ccucugcgcuuugugcugcc

SEQ ID NO: 43667 - RNA, 20 nt, Artificial Sequence
  GATA2 Guide RNA
ccucugcucaggagguggag

SEQ ID NO: 43668 - RNA, 20 nt, Artificial Sequence
  GATA2 Guide RNA
ccucuuacgggaagcccuuc

SEQ ID NO: 43669 - RNA, 20 nt, Artificial Sequence
  GATA2 Guide RNA
ccucuugccuggcagcacaa

SEQ ID NO: 43670 - RNA, 20 nt, Artificial Sequence
  GATA2 Guide RNA
ccugagcagaggcaaggcac

SEQ ID NO: 43671 - RNA, 20 nt, Artificial Sequence
  GATA2 Guide RNA
ccuggcagcacaaagcgcag

SEQ ID NO: 43672 - RNA, 20 nt, Artificial Sequence
  GATA2 Guide RNA
ccuguccuagccagcuccac

SEQ ID NO: 43673 - RNA, 20 nt, Artificial Sequence
  GATA2 Guide RNA
ccuugccucugcucaggagg

SEQ ID NO: 43674 - RNA, 20 nt, Artificial Sequence
  GATA2 Guide RNA
cgagacccuguccuagccag

SEQ ID NO: 43675 - RNA, 20 nt, Artificial Sequence
  GATA2 Guide RNA
cgcagagguccccugggagg

SEQ ID NO: 43676 - RNA, 20 nt, Artificial Sequence
  GATA2 Guide RNA
cgccagaagggcuucccgua

SEQ ID NO: 43677 - RNA, 20 nt, Artificial Sequence
  GATA2 Guide RNA
cgccccucccaggggaccuc

SEQ ID NO: 43678 - RNA, 20 nt, Artificial Sequence
  GATA2 Guide RNA
cgcuuugugcugccaggcaa

SEQ ID NO: 43679 - RNA, 20 nt, Artificial Sequence
  GATA2 Guide RNA
cguaagaggggugccuugcc

SEQ ID NO: 43680 - RNA, 20 nt, Artificial Sequence
  GATA2 Guide RNA
cuagccagcuccaccuccug

SEQ ID NO: 43681 - RNA, 20 nt, Artificial Sequence
  GATA2 Guide RNA
cucacucagggcagcagcuu

SEQ ID NO: 43682 - RNA, 20 nt, Artificial Sequence
  GATA2 Guide RNA
cucaggagguggagcuggcu

SEQ ID NO: 43683 - RNA, 20 nt, Artificial Sequence
  GATA2 Guide RNA
cucagggcagcagcuuccca

SEQ ID NO: 43684 - RNA, 20 nt, Artificial Sequence
  GATA2 Guide RNA
cuccaccuccugagcagagg

SEQ ID NO: 43685 - RNA, 20 nt, Artificial Sequence
  GATA2 Guide RNA
cucccaggggaccucugcgc

SEQ ID NO: 43686 - RNA, 20 nt, Artificial Sequence
  GATA2 Guide RNA
cuccugagcagaggcaaggc

SEQ ID NO: 43687 - RNA, 20 nt, Artificial Sequence
  GATA2 Guide RNA
cucugcgcuuugugcugcca

SEQ ID NO: 43688 - RNA, 20 nt, Artificial Sequence
  GATA2 Guide RNA
cucugcucaggagguggagc

SEQ ID NO: 43689 - RNA, 20 nt, Artificial Sequence
  GATA2 Guide RNA
cucuuacgggaagcccuucu

SEQ ID NO: 43690 - RNA, 20 nt, Artificial Sequence
  GATA2 Guide RNA
cucuugccuggcagcacaaa

SEQ ID NO: 43691 - RNA, 20 nt, Artificial Sequence
  GATA2 Guide RNA
cugagcagaggcaaggcacc

SEQ ID NO: 43692 - RNA, 20 nt, Artificial Sequence
  GATA2 Guide RNA
cugccaggcaagaggcccca

SEQ ID NO: 43693 - RNA, 20 nt, Artificial Sequence
  GATA2 Guide RNA
cugcgcuuugugcugccagg

SEQ ID NO: 43694 - RNA, 20 nt, Artificial Sequence
  GATA2 Guide RNA
cugcucaggagguggagcug

SEQ ID NO: 43695 - RNA, 20 nt, Artificial Sequence
  GATA2 Guide RNA
cuggauauuguggcuggggc

SEQ ID NO: 43696 - RNA, 20 nt, Artificial Sequence
  GATA2 Guide RNA
cuggcagcacaaagcgcaga

SEQ ID NO: 43697 - RNA, 20 nt, Artificial Sequence
  GATA2 Guide RNA
cuggggccucuugccuggca

SEQ ID NO: 43698 - RNA, 20 nt, Artificial Sequence
  GATA2 Guide RNA
cuguccuagccagcuccacc

SEQ ID NO: 43699 - RNA, 20 nt, Artificial Sequence
  GATA2 Guide RNA
cuucccaagccaagccaagc

SEQ ID NO: 43700 - RNA, 20 nt, Artificial Sequence
  GATA2 Guide RNA
cuucccguaagaggggugcc

SEQ ID NO: 43701 - RNA, 20 nt, Artificial Sequence
  GATA2 Guide RNA
cuugccucugcucaggaggu

SEQ ID NO: 43702 - RNA, 20 nt, Artificial Sequence
  GATA2 Guide RNA
cuugccuggcagcacaaagc

SEQ ID NO: 43703 - RNA, 20 nt, Artificial Sequence
  GATA2 Guide RNA
cuuggcuuggcuugggaagc

SEQ ID NO: 43704 - RNA, 20 nt, Artificial Sequence
  GATA2 Guide RNA
cuuggcuugggaagcugcug

SEQ ID NO: 43705 - RNA, 20 nt, Artificial Sequence
  GATA2 Guide RNA
cuugggaagcugcugcccug

SEQ ID NO: 43706 - RNA, 20 nt, Artificial Sequence
  GATA2 Guide RNA
cuuugugcugccaggcaaga

SEQ ID NO: 43707 - RNA, 20 nt, Artificial Sequence
  GATA2 Guide RNA
gaagggcuucccguaagagg

SEQ ID NO: 43708 - RNA, 20 nt, Artificial Sequence
  GATA2 Guide RNA
gacccuguccuagccagcuc

SEQ ID NO: 43709 - RNA, 20 nt, Artificial Sequence
  GATA2 Guide RNA
gaccucugcgcuuugugcug

SEQ ID NO: 43710 - RNA, 20 nt, Artificial Sequence
  GATA2 Guide RNA
gagacccuguccuagccagc

SEQ ID NO: 43711 - RNA, 20 nt, Artificial Sequence
  GATA2 Guide RNA
gagcagaggcaaggcacccc

SEQ ID NO: 43712 - RNA, 20 nt, Artificial Sequence
  GATA2 Guide RNA
gagcuggcuaggacaggguc

SEQ ID NO: 43713 - RNA, 20 nt, Artificial Sequence
  GATA2 Guide RNA
gaggcaaggcaccccucuua

SEQ ID NO: 43714 - RNA, 20 nt, Artificial Sequence
  GATA2 Guide RNA
gaggccccagccacaauauc

SEQ ID NO: 43715 - RNA, 20 nt, Artificial Sequence
  GATA2 Guide RNA
gaggggugccuugccucugc

SEQ ID NO: 43716 - RNA, 20 nt, Artificial Sequence
  GATA2 Guide RNA
gagguccccugggaggggcg

SEQ ID NO: 43717 - RNA, 20 nt, Artificial Sequence
  GATA2 Guide RNA
gagguggagcuggcuaggac

SEQ ID NO: 43718 - RNA, 20 nt, Artificial Sequence
  GATA2 Guide RNA
gauauuguggcuggggccuc

SEQ ID NO: 43719 - RNA, 20 nt, Artificial Sequence
  GATA2 Guide RNA
gcaagaggccccagccacaa

SEQ ID NO: 43720 - RNA, 20 nt, Artificial Sequence
  GATA2 Guide RNA
gcaaggcaccccucuuacgg

SEQ ID NO: 43721 - RNA, 20 nt, Artificial Sequence
  GATA2 Guide RNA
gcacaaagcgcagagguccc

SEQ ID NO: 43722 - RNA, 20 nt, Artificial Sequence
  GATA2 Guide RNA
gcaccccucuuacgggaagc

SEQ ID NO: 43723 - RNA, 20 nt, Artificial Sequence
  GATA2 Guide RNA
gcagaggcaaggcaccccuc

SEQ ID NO: 43724 - RNA, 20 nt, Artificial Sequence
  GATA2 Guide RNA
gcagagguccccugggaggg

SEQ ID NO: 43725 - RNA, 20 nt, Artificial Sequence
  GATA2 Guide RNA
gcagcacaaagcgcagaggu

SEQ ID NO: 43726 - RNA, 20 nt, Artificial Sequence
  GATA2 Guide RNA
gcagcagcuucccaagccaa

SEQ ID NO: 43727 - RNA, 20 nt, Artificial Sequence
  GATA2 Guide RNA
gcagcuucccaagccaagcc

SEQ ID NO: 43728 - RNA, 20 nt, Artificial Sequence
  GATA2 Guide RNA
gccaagccaagcuggauauu

SEQ ID NO: 43729 - RNA, 20 nt, Artificial Sequence
  GATA2 Guide RNA
gccaagcuggauauuguggc

SEQ ID NO: 43730 - RNA, 20 nt, Artificial Sequence
  GATA2 Guide RNA
gccacaauauccagcuuggc

SEQ ID NO: 43731 - RNA, 20 nt, Artificial Sequence
  GATA2 Guide RNA
gccagaagggcuucccguaa

SEQ ID NO: 43732 - RNA, 20 nt, Artificial Sequence
  GATA2 Guide RNA
gccagcuccaccuccugagc

SEQ ID NO: 43733 - RNA, 20 nt, Artificial Sequence
  GATA2 Guide RNA
gccaggcaagaggccccagc

SEQ ID NO: 43734 - RNA, 20 nt, Artificial Sequence
  GATA2 Guide RNA
gccccagccacaauauccag

SEQ ID NO: 43735 - RNA, 20 nt, Artificial Sequence
  GATA2 Guide RNA
gccccucccaggggaccucu

SEQ ID NO: 43736 - RNA, 20 nt, Artificial Sequence
  GATA2 Guide RNA
gccucugcucaggaggugga

SEQ ID NO: 43737 - RNA, 20 nt, Artificial Sequence
  GATA2 Guide RNA
gccucuugccuggcagcaca

SEQ ID NO: 43738 - RNA, 20 nt, Artificial Sequence
  GATA2 Guide RNA
gccuggcagcacaaagcgca

SEQ ID NO: 43739 - RNA, 20 nt, Artificial Sequence
  GATA2 Guide RNA
gccuugccucugcucaggag

SEQ ID NO: 43740 - RNA, 20 nt, Artificial Sequence
  GATA2 Guide RNA
gcgcagagguccccugggag

SEQ ID NO: 43741 - RNA, 20 nt, Artificial Sequence
  GATA2 Guide RNA
gcgcuuugugcugccaggca

SEQ ID NO: 43742 - RNA, 20 nt, Artificial Sequence
  GATA2 Guide RNA
gcucaggagguggagcuggc

SEQ ID NO: 43743 - RNA, 20 nt, Artificial Sequence
  GATA2 Guide RNA
gcuccaccuccugagcagag

SEQ ID NO: 43744 - RNA, 20 nt, Artificial Sequence
  GATA2 Guide RNA
gcugccaggcaagaggcccc

SEQ ID NO: 43745 - RNA, 20 nt, Artificial Sequence
  GATA2 Guide RNA
gcuggauauuguggcugggg

SEQ ID NO: 43746 - RNA, 20 nt, Artificial Sequence
  GATA2 Guide RNA
gcuggggccucuugccuggc

SEQ ID NO: 43747 - RNA, 20 nt, Artificial Sequence
  GATA2 Guide RNA
gcuucccaagccaagccaag

SEQ ID NO: 43748 - RNA, 20 nt, Artificial Sequence
  GATA2 Guide RNA
gcuucccguaagaggggugc

SEQ ID NO: 43749 - RNA, 20 nt, Artificial Sequence
  GATA2 Guide RNA
gcuuggcuuggcuugggaag

SEQ ID NO: 43750 - RNA, 20 nt, Artificial Sequence
  GATA2 Guide RNA
gcuuggcuugggaagcugcu

SEQ ID NO: 43751 - RNA, 20 nt, Artificial Sequence
  GATA2 Guide RNA
gcuugggaagcugcugcccu

SEQ ID NO: 43752 - RNA, 20 nt, Artificial Sequence
  GATA2 Guide RNA
gcuuugugcugccaggcaag

SEQ ID NO: 43753 - RNA, 20 nt, Artificial Sequence
  GATA2 Guide RNA
ggaccucugcgcuuugugcu

SEQ ID NO: 43754 - RNA, 20 nt, Artificial Sequence
  GATA2 Guide RNA
ggagcuggcuaggacagggu

SEQ ID NO: 43755 - RNA, 20 nt, Artificial Sequence
  GATA2 Guide RNA
ggagguggagcuggcuagga

SEQ ID NO: 43756 - RNA, 20 nt, Artificial Sequence
  GATA2 Guide RNA
ggauauuguggcuggggccu

SEQ ID NO: 43757 - RNA, 20 nt, Artificial Sequence
  GATA2 Guide RNA
ggcaagaggccccagccaca

SEQ ID NO: 43758 - RNA, 20 nt, Artificial Sequence
  GATA2 Guide RNA
ggcaaggcaccccucuuacg

SEQ ID NO: 43759 - RNA, 20 nt, Artificial Sequence
  GATA2 Guide RNA
ggcaccccucuuacgggaag

SEQ ID NO: 43760 - RNA, 20 nt, Artificial Sequence
  GATA2 Guide RNA
ggcagcacaaagcgcagagg

SEQ ID NO: 43761 - RNA, 20 nt, Artificial Sequence
  GATA2 Guide RNA
ggcagcagcuucccaagcca

SEQ ID NO: 43762 - RNA, 20 nt, Artificial Sequence
  GATA2 Guide RNA
ggccccagccacaauaucca

SEQ ID NO: 43763 - RNA, 20 nt, Artificial Sequence
  GATA2 Guide RNA
ggccucuugccuggcagcac

SEQ ID NO: 43764 - RNA, 20 nt, Artificial Sequence
  GATA2 Guide RNA
ggcuggggccucuugccugg

SEQ ID NO: 43765 - RNA, 20 nt, Artificial Sequence
  GATA2 Guide RNA
ggcuucccguaagaggggug

SEQ ID NO: 43766 - RNA, 20 nt, Artificial Sequence
  GATA2 Guide RNA
ggcuuggcuugggaagcugc

SEQ ID NO: 43767 - RNA, 20 nt, Artificial Sequence
  GATA2 Guide RNA
ggcuugggaagcugcugccc

SEQ ID NO: 43768 - RNA, 20 nt, Artificial Sequence
  GATA2 Guide RNA
gggaccucugcgcuuugugc

SEQ ID NO: 43769 - RNA, 20 nt, Artificial Sequence
  GATA2 Guide RNA
gggcagcagcuucccaagcc

SEQ ID NO: 43770 - RNA, 20 nt, Artificial Sequence
  GATA2 Guide RNA
gggccucuugccuggcagca

SEQ ID NO: 43771 - RNA, 20 nt, Artificial Sequence
  GATA2 Guide RNA
gggcuucccguaagaggggu

SEQ ID NO: 43772 - RNA, 20 nt, Artificial Sequence
  GATA2 Guide RNA
ggggaccucugcgcuuugug

SEQ ID NO: 43773 - RNA, 20 nt, Artificial Sequence
  GATA2 Guide RNA
ggggccucuugccuggcagc

SEQ ID NO: 43774 - RNA, 20 nt, Artificial Sequence
  GATA2 Guide RNA
ggggugccuugccucugcuc

SEQ ID NO: 43775 - RNA, 20 nt, Artificial Sequence
  GATA2 Guide RNA
gggugccuugccucugcuca

SEQ ID NO: 43776 - RNA, 20 nt, Artificial Sequence
  GATA2 Guide RNA
ggugccuugccucugcucag

SEQ ID NO: 43777 - RNA, 20 nt, Artificial Sequence
  GATA2 Guide RNA
gguggagcuggcuaggacag

SEQ ID NO: 43778 - RNA, 20 nt, Artificial Sequence
  GATA2 Guide RNA
guaagaggggugccuugccu

SEQ ID NO: 43779 - RNA, 20 nt, Artificial Sequence
  GATA2 Guide RNA
guccuagccagcuccaccuc

SEQ ID NO: 43780 - RNA, 20 nt, Artificial Sequence
  GATA2 Guide RNA
gugccuugccucugcucagg

SEQ ID NO: 43781 - RNA, 20 nt, Artificial Sequence
  GATA2 Guide RNA
gugcugccaggcaagaggcc

SEQ ID NO: 43782 - RNA, 20 nt, Artificial Sequence
  GATA2 Guide RNA
guggagcuggcuaggacagg

SEQ ID NO: 43783 - RNA, 20 nt, Artificial Sequence
  GATA2 Guide RNA
guggcuggggccucuugccu

SEQ ID NO: 43784 - RNA, 20 nt, Artificial Sequence
  GATA2 Guide RNA
uaagaggggugccuugccuc

SEQ ID NO: 43785 - RNA, 20 nt, Artificial Sequence
  GATA2 Guide RNA
uagccagcuccaccuccuga

SEQ ID NO: 43786 - RNA, 20 nt, Artificial Sequence
  GATA2 Guide RNA
uauccagcuuggcuuggcuu

SEQ ID NO: 43787 - RNA, 20 nt, Artificial Sequence
  GATA2 Guide RNA
uauuguggcuggggccucuu

SEQ ID NO: 43788 - RNA, 20 nt, Artificial Sequence
  GATA2 Guide RNA
ucacucagggcagcagcuuc

SEQ ID NO: 43789 - RNA, 20 nt, Artificial Sequence
  GATA2 Guide RNA
ucaggagguggagcuggcua

SEQ ID NO: 43790 - RNA, 20 nt, Artificial Sequence
  GATA2 Guide RNA
ucagggcagcagcuucccaa

SEQ ID NO: 43791 - RNA, 20 nt, Artificial Sequence
  GATA2 Guide RNA
uccaccuccugagcagaggc

SEQ ID NO: 43792 - RNA, 20 nt, Artificial Sequence
  GATA2 Guide RNA
uccagcuuggcuuggcuugg

SEQ ID NO: 43793 - RNA, 20 nt, Artificial Sequence
  GATA2 Guide RNA
ucccaagccaagccaagcug

SEQ ID NO: 43794 - RNA, 20 nt, Artificial Sequence
  GATA2 Guide RNA
ucccaggggaccucugcgcu

SEQ ID NO: 43795 - RNA, 20 nt, Artificial Sequence
  GATA2 Guide RNA
uccccugggaggggcggggu

SEQ ID NO: 43796 - RNA, 20 nt, Artificial Sequence
  GATA2 Guide RNA
ucccguaagaggggugccuu

SEQ ID NO: 43797 - RNA, 20 nt, Artificial Sequence
  GATA2 Guide RNA
uccuagccagcuccaccucc

SEQ ID NO: 43798 - RNA, 20 nt, Artificial Sequence
  GATA2 Guide RNA
uccugagcagaggcaaggca

SEQ ID NO: 43799 - RNA, 20 nt, Artificial Sequence
  GATA2 Guide RNA
ucugcgcuuugugcugccag

SEQ ID NO: 43800 - RNA, 20 nt, Artificial Sequence
  GATA2 Guide RNA
ucugcucaggagguggagcu

SEQ ID NO: 43801 - RNA, 20 nt, Artificial Sequence
  GATA2 Guide RNA
ucuugccuggcagcacaaag

SEQ ID NO: 43802 - RNA, 20 nt, Artificial Sequence
  GATA2 Guide RNA
ugagcagaggcaaggcaccc

SEQ ID NO: 43803 - RNA, 20 nt, Artificial Sequence
  GATA2 Guide RNA
ugccaggcaagaggccccag

SEQ ID NO: 43804 - RNA, 20 nt, Artificial Sequence
  GATA2 Guide RNA
ugccucugcucaggaggugg

SEQ ID NO: 43805 - RNA, 20 nt, Artificial Sequence
  GATA2 Guide RNA
ugccuggcagcacaaagcgc

SEQ ID NO: 43806 - RNA, 20 nt, Artificial Sequence
  GATA2 Guide RNA
ugccuugccucugcucagga

SEQ ID NO: 43807 - RNA, 20 nt, Artificial Sequence
  GATA2 Guide RNA
ugcgcuuugugcugccaggc

SEQ ID NO: 43808 - RNA, 20 nt, Artificial Sequence
  GATA2 Guide RNA
ugcucaggagguggagcugg

SEQ ID NO: 43809 - RNA, 20 nt, Artificial Sequence
  GATA2 Guide RNA
ugcugccaggcaagaggccc

SEQ ID NO: 43810 - RNA, 20 nt, Artificial Sequence
  GATA2 Guide RNA
uggagcuggcuaggacaggg

SEQ ID NO: 43811 - RNA, 20 nt, Artificial Sequence
  GATA2 Guide RNA
uggauauuguggcuggggcc

SEQ ID NO: 43812 - RNA, 20 nt, Artificial Sequence
  GATA2 Guide RNA
uggcagcacaaagcgcagag

SEQ ID NO: 43813 - RNA, 20 nt, Artificial Sequence
  GATA2 Guide RNA
uggcuggggccucuugccug

SEQ ID NO: 43814 - RNA, 20 nt, Artificial Sequence
  GATA2 Guide RNA
uggcuuggcuugggaagcug

SEQ ID NO: 43815 - RNA, 20 nt, Artificial Sequence
  GATA2 Guide RNA
uggcuugggaagcugcugcc

SEQ ID NO: 43816 - RNA, 20 nt, Artificial Sequence
  GATA2 Guide RNA
ugggaagcugcugcccugag

SEQ ID NO: 43817 - RNA, 20 nt, Artificial Sequence
  GATA2 Guide RNA
uggggccucuugccuggcag

SEQ ID NO: 43818 - RNA, 20 nt, Artificial Sequence
  GATA2 Guide RNA
uguccuagccagcuccaccu

SEQ ID NO: 43819 - RNA, 20 nt, Artificial Sequence
  GATA2 Guide RNA
ugugcugccaggcaagaggc

SEQ ID NO: 43820 - RNA, 20 nt, Artificial Sequence
  GATA2 Guide RNA
uguggcuggggccucuugcc

SEQ ID NO: 43821 - RNA, 20 nt, Artificial Sequence
  GATA2 Guide RNA
uucccaagccaagccaagcu

SEQ ID NO: 43822 - RNA, 20 nt, Artificial Sequence
  GATA2 Guide RNA
uucccguaagaggggugccu

SEQ ID NO: 43823 - RNA, 20 nt, Artificial Sequence
  GATA2 Guide RNA
uugccucugcucaggaggug

SEQ ID NO: 43824 - RNA, 20 nt, Artificial Sequence
  GATA2 Guide RNA
uugccuggcagcacaaagcg

SEQ ID NO: 43825 - RNA, 20 nt, Artificial Sequence
  GATA2 Guide RNA
uuggcuuggcuugggaagcu

SEQ ID NO: 43826 - RNA, 20 nt, Artificial Sequence
  GATA2 Guide RNA
uuggcuugggaagcugcugc

SEQ ID NO: 43827 - RNA, 20 nt, Artificial Sequence
  GATA2 Guide RNA
uugggaagcugcugcccuga

SEQ ID NO: 43828 - RNA, 20 nt, Artificial Sequence
  GATA2 Guide RNA
uugugcugccaggcaagagg

SEQ ID NO: 43829 - RNA, 20 nt, Artificial Sequence
  GATA2 Guide RNA
uuguggcuggggccucuugc

SEQ ID NO: 43830 - RNA, 20 nt, Artificial Sequence
  GATA2 Guide RNA
uuugugcugccaggcaagag

SEQ ID NO: 43831 - RNA, 21 nt, Artificial Sequence
  GATA2 Guide RNA
aaagcgcagagguccccuggg

SEQ ID NO: 43832 - RNA, 21 nt, Artificial Sequence
  GATA2 Guide RNA
aagaggccccagccacaauau

SEQ ID NO: 43833 - RNA, 21 nt, Artificial Sequence
  GATA2 Guide RNA
aagaggggugccuugccucug

SEQ ID NO: 43834 - RNA, 21 nt, Artificial Sequence
  GATA2 Guide RNA
aagccaagccaagcuggauau

SEQ ID NO: 43835 - RNA, 21 nt, Artificial Sequence
  GATA2 Guide RNA
aagccaagcuggauauugugg

SEQ ID NO: 43836 - RNA, 21 nt, Artificial Sequence
  GATA2 Guide RNA
aagcgcagagguccccuggga

SEQ ID NO: 43837 - RNA, 21 nt, Artificial Sequence
  GATA2 Guide RNA
aagcuggauauuguggcuggg

SEQ ID NO: 43838 - RNA, 21 nt, Artificial Sequence
  GATA2 Guide RNA
aaggcaccccucuuacgggaa

SEQ ID NO: 43839 - RNA, 21 nt, Artificial Sequence
  GATA2 Guide RNA
aagggcuucccguaagagggg

SEQ ID NO: 43840 - RNA, 21 nt, Artificial Sequence
  GATA2 Guide RNA
aauauccagcuuggcuuggcu

SEQ ID NO: 43841 - RNA, 21 nt, Artificial Sequence
  GATA2 Guide RNA
acaaagcgcagagguccccug

SEQ ID NO: 43842 - RNA, 21 nt, Artificial Sequence
  GATA2 Guide RNA
acaauauccagcuuggcuugg

SEQ ID NO: 43843 - RNA, 21 nt, Artificial Sequence
  GATA2 Guide RNA
accccucuuacgggaagcccu

SEQ ID NO: 43844 - RNA, 21 nt, Artificial Sequence
  GATA2 Guide RNA
acccuguccuagccagcucca

SEQ ID NO: 43845 - RNA, 21 nt, Artificial Sequence
  GATA2 Guide RNA
accuccugagcagaggcaagg

SEQ ID NO: 43846 - RNA, 21 nt, Artificial Sequence
  GATA2 Guide RNA
accucugcgcuuugugcugcc

SEQ ID NO: 43847 - RNA, 21 nt, Artificial Sequence
  GATA2 Guide RNA
acucagggcagcagcuuccca

SEQ ID NO: 43848 - RNA, 21 nt, Artificial Sequence
  GATA2 Guide RNA
agaagggcuucccguaagagg

SEQ ID NO: 43849 - RNA, 21 nt, Artificial Sequence
  GATA2 Guide RNA
agacccuguccuagccagcuc

SEQ ID NO: 43850 - RNA, 21 nt, Artificial Sequence
  GATA2 Guide RNA
agaggcaaggcaccccucuua

SEQ ID NO: 43851 - RNA, 21 nt, Artificial Sequence
  GATA2 Guide RNA
agaggccccagccacaauauc

SEQ ID NO: 43852 - RNA, 21 nt, Artificial Sequence
  GATA2 Guide RNA
agaggggugccuugccucugc

SEQ ID NO: 43853 - RNA, 21 nt, Artificial Sequence
  GATA2 Guide RNA
agagguccccugggaggggcg

SEQ ID NO: 43854 - RNA, 21 nt, Artificial Sequence
  GATA2 Guide RNA
agcacaaagcgcagagguccc

SEQ ID NO: 43855 - RNA, 21 nt, Artificial Sequence
  GATA2 Guide RNA
agcagaggcaaggcaccccuc

SEQ ID NO: 43856 - RNA, 21 nt, Artificial Sequence
  GATA2 Guide RNA
agcagcuucccaagccaagcc

SEQ ID NO: 43857 - RNA, 21 nt, Artificial Sequence
  GATA2 Guide RNA
agccaagccaagcuggauauu

SEQ ID NO: 43858 - RNA, 21 nt, Artificial Sequence
  GATA2 Guide RNA
agccaagcuggauauuguggc

SEQ ID NO: 43859 - RNA, 21 nt, Artificial Sequence
  GATA2 Guide RNA
agccacaauauccagcuuggc

SEQ ID NO: 43860 - RNA, 21 nt, Artificial Sequence
  GATA2 Guide RNA
agccagcuccaccuccugagc

SEQ ID NO: 43861 - RNA, 21 nt, Artificial Sequence
  GATA2 Guide RNA
agcgcagagguccccugggag

SEQ ID NO: 43862 - RNA, 21 nt, Artificial Sequence
  GATA2 Guide RNA
agcuccaccuccugagcagag

SEQ ID NO: 43863 - RNA, 21 nt, Artificial Sequence
  GATA2 Guide RNA
agcuggauauuguggcugggg

SEQ ID NO: 43864 - RNA, 21 nt, Artificial Sequence
  GATA2 Guide RNA
agcuucccaagccaagccaag

SEQ ID NO: 43865 - RNA, 21 nt, Artificial Sequence
  GATA2 Guide RNA
agcuuggcuuggcuugggaag

SEQ ID NO: 43866 - RNA, 21 nt, Artificial Sequence
  GATA2 Guide RNA
aggagguggagcuggcuagga

SEQ ID NO: 43867 - RNA, 21 nt, Artificial Sequence
  GATA2 Guide RNA
aggcaagaggccccagccaca

SEQ ID NO: 43868 - RNA, 21 nt, Artificial Sequence
  GATA2 Guide RNA
aggcaaggcaccccucuuacg

SEQ ID NO: 43869 - RNA, 21 nt, Artificial Sequence
  GATA2 Guide RNA
aggcaccccucuuacgggaag

SEQ ID NO: 43870 - RNA, 21 nt, Artificial Sequence
  GATA2 Guide RNA
aggccccagccacaauaucca

SEQ ID NO: 43871 - RNA, 21 nt, Artificial Sequence
  GATA2 Guide RNA
agggcagcagcuucccaagcc

SEQ ID NO: 43872 - RNA, 21 nt, Artificial Sequence
  GATA2 Guide RNA
agggcuucccguaagaggggu

SEQ ID NO: 43873 - RNA, 21 nt, Artificial Sequence
  GATA2 Guide RNA
aggggaccucugcgcuuugug

SEQ ID NO: 43874 - RNA, 21 nt, Artificial Sequence
  GATA2 Guide RNA
aggggugccuugccucugcuc

SEQ ID NO: 43875 - RNA, 21 nt, Artificial Sequence
  GATA2 Guide RNA
agguggagcuggcuaggacag

SEQ ID NO: 43876 - RNA, 21 nt, Artificial Sequence
  GATA2 Guide RNA
auauccagcuuggcuuggcuu

SEQ ID NO: 43877 - RNA, 21 nt, Artificial Sequence
  GATA2 Guide RNA
auauuguggcuggggccucuu

SEQ ID NO: 43878 - RNA, 21 nt, Artificial Sequence
  GATA2 Guide RNA
auccagcuuggcuuggcuugg

SEQ ID NO: 43879 - RNA, 21 nt, Artificial Sequence
  GATA2 Guide RNA
auuguggcuggggccucuugc

SEQ ID NO: 43880 - RNA, 21 nt, Artificial Sequence
  GATA2 Guide RNA
caaagcgcagagguccccugg

SEQ ID NO: 43881 - RNA, 21 nt, Artificial Sequence
  GATA2 Guide RNA
caagaggccccagccacaaua

SEQ ID NO: 43882 - RNA, 21 nt, Artificial Sequence
  GATA2 Guide RNA
caagccaagccaagcuggaua

SEQ ID NO: 43883 - RNA, 21 nt, Artificial Sequence
  GATA2 Guide RNA
caagccaagcuggauauugug

SEQ ID NO: 43884 - RNA, 21 nt, Artificial Sequence
  GATA2 Guide RNA
caagcuggauauuguggcugg

SEQ ID NO: 43885 - RNA, 21 nt, Artificial Sequence
  GATA2 Guide RNA
caaggcaccccucuuacggga

SEQ ID NO: 43886 - RNA, 21 nt, Artificial Sequence
  GATA2 Guide RNA
caauauccagcuuggcuuggc

SEQ ID NO: 43887 - RNA, 21 nt, Artificial Sequence
  GATA2 Guide RNA
cacaaagcgcagagguccccu

SEQ ID NO: 43888 - RNA, 21 nt, Artificial Sequence
  GATA2 Guide RNA
cacaauauccagcuuggcuug

SEQ ID NO: 43889 - RNA, 21 nt, Artificial Sequence
  GATA2 Guide RNA
caccccucuuacgggaagccc

SEQ ID NO: 43890 - RNA, 21 nt, Artificial Sequence
  GATA2 Guide RNA
caccuccugagcagaggcaag

SEQ ID NO: 43891 - RNA, 21 nt, Artificial Sequence
  GATA2 Guide RNA
cacucagggcagcagcuuccc

SEQ ID NO: 43892 - RNA, 21 nt, Artificial Sequence
  GATA2 Guide RNA
cagaagggcuucccguaagag

SEQ ID NO: 43893 - RNA, 21 nt, Artificial Sequence
  GATA2 Guide RNA
cagaggcaaggcaccccucuu

SEQ ID NO: 43894 - RNA, 21 nt, Artificial Sequence
  GATA2 Guide RNA
cagagguccccugggaggggc

SEQ ID NO: 43895 - RNA, 21 nt, Artificial Sequence
  GATA2 Guide RNA
cagcacaaagcgcagaggucc

SEQ ID NO: 43896 - RNA, 21 nt, Artificial Sequence
  GATA2 Guide RNA
cagcagcuucccaagccaagc

SEQ ID NO: 43897 - RNA, 21 nt, Artificial Sequence
  GATA2 Guide RNA
cagccacaauauccagcuugg

SEQ ID NO: 43898 - RNA, 21 nt, Artificial Sequence
  GATA2 Guide RNA
cagcuccaccuccugagcaga

SEQ ID NO: 43899 - RNA, 21 nt, Artificial Sequence
  GATA2 Guide RNA
cagcuucccaagccaagccaa

SEQ ID NO: 43900 - RNA, 21 nt, Artificial Sequence
  GATA2 Guide RNA
cagcuuggcuuggcuugggaa

SEQ ID NO: 43901 - RNA, 21 nt, Artificial Sequence
  GATA2 Guide RNA
caggagguggagcuggcuagg

SEQ ID NO: 43902 - RNA, 21 nt, Artificial Sequence
  GATA2 Guide RNA
caggcaagaggccccagccac

SEQ ID NO: 43903 - RNA, 21 nt, Artificial Sequence
  GATA2 Guide RNA
cagggcagcagcuucccaagc

SEQ ID NO: 43904 - RNA, 21 nt, Artificial Sequence
  GATA2 Guide RNA
caggggaccucugcgcuuugu

SEQ ID NO: 43905 - RNA, 21 nt, Artificial Sequence
  GATA2 Guide RNA
ccaagccaagccaagcuggau

SEQ ID NO: 43906 - RNA, 21 nt, Artificial Sequence
  GATA2 Guide RNA
ccaagccaagcuggauauugu

SEQ ID NO: 43907 - RNA, 21 nt, Artificial Sequence
  GATA2 Guide RNA
ccaagcuggauauuguggcug

SEQ ID NO: 43908 - RNA, 21 nt, Artificial Sequence
  GATA2 Guide RNA
ccacaauauccagcuuggcuu

SEQ ID NO: 43909 - RNA, 21 nt, Artificial Sequence
  GATA2 Guide RNA
ccaccuccugagcagaggcaa

SEQ ID NO: 43910 - RNA, 21 nt, Artificial Sequence
  GATA2 Guide RNA
ccagaagggcuucccguaaga

SEQ ID NO: 43911 - RNA, 21 nt, Artificial Sequence
  GATA2 Guide RNA
ccagccacaauauccagcuug

SEQ ID NO: 43912 - RNA, 21 nt, Artificial Sequence
  GATA2 Guide RNA
ccagcuccaccuccugagcag

SEQ ID NO: 43913 - RNA, 21 nt, Artificial Sequence
  GATA2 Guide RNA
ccagcuuggcuuggcuuggga

SEQ ID NO: 43914 - RNA, 21 nt, Artificial Sequence
  GATA2 Guide RNA
ccaggcaagaggccccagcca

SEQ ID NO: 43915 - RNA, 21 nt, Artificial Sequence
  GATA2 Guide RNA
ccaggggaccucugcgcuuug

SEQ ID NO: 43916 - RNA, 21 nt, Artificial Sequence
  GATA2 Guide RNA
cccaagccaagccaagcugga

SEQ ID NO: 43917 - RNA, 21 nt, Artificial Sequence
  GATA2 Guide RNA
cccagccacaauauccagcuu

SEQ ID NO: 43918 - RNA, 21 nt, Artificial Sequence
  GATA2 Guide RNA
cccaggggaccucugcgcuuu

SEQ ID NO: 43919 - RNA, 21 nt, Artificial Sequence
  GATA2 Guide RNA
ccccagccacaauauccagcu

SEQ ID NO: 43920 - RNA, 21 nt, Artificial Sequence
  GATA2 Guide RNA
ccccucccaggggaccucugc

SEQ ID NO: 43921 - RNA, 21 nt, Artificial Sequence
  GATA2 Guide RNA
ccccucuuacgggaagcccuu

SEQ ID NO: 43922 - RNA, 21 nt, Artificial Sequence
  GATA2 Guide RNA
cccguaagaggggugccuugc

SEQ ID NO: 43923 - RNA, 21 nt, Artificial Sequence
  GATA2 Guide RNA
cccucccaggggaccucugcg

SEQ ID NO: 43924 - RNA, 21 nt, Artificial Sequence
  GATA2 Guide RNA
cccucuuacgggaagcccuuc

SEQ ID NO: 43925 - RNA, 21 nt, Artificial Sequence
  GATA2 Guide RNA
cccuguccuagccagcuccac

SEQ ID NO: 43926 - RNA, 21 nt, Artificial Sequence
  GATA2 Guide RNA
ccgagacccuguccuagccag

SEQ ID NO: 43927 - RNA, 21 nt, Artificial Sequence
  GATA2 Guide RNA
ccguaagaggggugccuugcc

SEQ ID NO: 43928 - RNA, 21 nt, Artificial Sequence
  GATA2 Guide RNA
ccuagccagcuccaccuccug

SEQ ID NO: 43929 - RNA, 21 nt, Artificial Sequence
  GATA2 Guide RNA
ccucccaggggaccucugcgc

SEQ ID NO: 43930 - RNA, 21 nt, Artificial Sequence
  GATA2 Guide RNA
ccuccugagcagaggcaaggc

SEQ ID NO: 43931 - RNA, 21 nt, Artificial Sequence
  GATA2 Guide RNA
ccucugcgcuuugugcugcca

SEQ ID NO: 43932 - RNA, 21 nt, Artificial Sequence
  GATA2 Guide RNA
ccucugcucaggagguggagc

SEQ ID NO: 43933 - RNA, 21 nt, Artificial Sequence
  GATA2 Guide RNA
ccucuuacgggaagcccuucu

SEQ ID NO: 43934 - RNA, 21 nt, Artificial Sequence
  GATA2 Guide RNA
ccucuugccuggcagcacaaa

SEQ ID NO: 43935 - RNA, 21 nt, Artificial Sequence
  GATA2 Guide RNA
ccugagcagaggcaaggcacc

SEQ ID NO: 43936 - RNA, 21 nt, Artificial Sequence
  GATA2 Guide RNA
ccuggcagcacaaagcgcaga

SEQ ID NO: 43937 - RNA, 21 nt, Artificial Sequence
  GATA2 Guide RNA
ccuguccuagccagcuccacc

SEQ ID NO: 43938 - RNA, 21 nt, Artificial Sequence
  GATA2 Guide RNA
ccuugccucugcucaggaggu

SEQ ID NO: 43939 - RNA, 21 nt, Artificial Sequence
  GATA2 Guide RNA
cgagacccuguccuagccagc

SEQ ID NO: 43940 - RNA, 21 nt, Artificial Sequence
  GATA2 Guide RNA
cgcagagguccccugggaggg

SEQ ID NO: 43941 - RNA, 21 nt, Artificial Sequence
  GATA2 Guide RNA
cgccagaagggcuucccguaa

SEQ ID NO: 43942 - RNA, 21 nt, Artificial Sequence
  GATA2 Guide RNA
cgccccucccaggggaccucu

SEQ ID NO: 43943 - RNA, 21 nt, Artificial Sequence
  GATA2 Guide RNA
cgcuuugugcugccaggcaag

SEQ ID NO: 43944 - RNA, 21 nt, Artificial Sequence
  GATA2 Guide RNA
cguaagaggggugccuugccu

SEQ ID NO: 43945 - RNA, 21 nt, Artificial Sequence
  GATA2 Guide RNA
cuagccagcuccaccuccuga

SEQ ID NO: 43946 - RNA, 21 nt, Artificial Sequence
  GATA2 Guide RNA
cucacucagggcagcagcuuc

SEQ ID NO: 43947 - RNA, 21 nt, Artificial Sequence
  GATA2 Guide RNA
cucaggagguggagcuggcua

SEQ ID NO: 43948 - RNA, 21 nt, Artificial Sequence
  GATA2 Guide RNA
cucagggcagcagcuucccaa

SEQ ID NO: 43949 - RNA, 21 nt, Artificial Sequence
  GATA2 Guide RNA
cuccaccuccugagcagaggc

SEQ ID NO: 43950 - RNA, 21 nt, Artificial Sequence
  GATA2 Guide RNA
cucccaggggaccucugcgcu

SEQ ID NO: 43951 - RNA, 21 nt, Artificial Sequence
  GATA2 Guide RNA
cuccugagcagaggcaaggca

SEQ ID NO: 43952 - RNA, 21 nt, Artificial Sequence
  GATA2 Guide RNA
cucugcgcuuugugcugccag

SEQ ID NO: 43953 - RNA, 21 nt, Artificial Sequence
  GATA2 Guide RNA
cucugcucaggagguggagcu

SEQ ID NO: 43954 - RNA, 21 nt, Artificial Sequence
  GATA2 Guide RNA
cucuugccuggcagcacaaag

SEQ ID NO: 43955 - RNA, 21 nt, Artificial Sequence
  GATA2 Guide RNA
cugagcagaggcaaggcaccc

SEQ ID NO: 43956 - RNA, 21 nt, Artificial Sequence
  GATA2 Guide RNA
cugccaggcaagaggccccag

SEQ ID NO: 43957 - RNA, 21 nt, Artificial Sequence
  GATA2 Guide RNA
cugcgcuuugugcugccaggc

SEQ ID NO: 43958 - RNA, 21 nt, Artificial Sequence
  GATA2 Guide RNA
cugcucaggagguggagcugg

SEQ ID NO: 43959 - RNA, 21 nt, Artificial Sequence
  GATA2 Guide RNA
cuggauauuguggcuggggcc

SEQ ID NO: 43960 - RNA, 21 nt, Artificial Sequence
  GATA2 Guide RNA
cuggcagcacaaagcgcagag

SEQ ID NO: 43961 - RNA, 21 nt, Artificial Sequence
  GATA2 Guide RNA
cuggggccucuugccuggcag

SEQ ID NO: 43962 - RNA, 21 nt, Artificial Sequence
  GATA2 Guide RNA
cuguccuagccagcuccaccu

SEQ ID NO: 43963 - RNA, 21 nt, Artificial Sequence
  GATA2 Guide RNA
cuucccaagccaagccaagcu

SEQ ID NO: 43964 - RNA, 21 nt, Artificial Sequence
  GATA2 Guide RNA
cuucccguaagaggggugccu

SEQ ID NO: 43965 - RNA, 21 nt, Artificial Sequence
  GATA2 Guide RNA
cuugccucugcucaggaggug

SEQ ID NO: 43966 - RNA, 21 nt, Artificial Sequence
  GATA2 Guide RNA
cuugccuggcagcacaaagcg

SEQ ID NO: 43967 - RNA, 21 nt, Artificial Sequence
  GATA2 Guide RNA
cuuggcuuggcuugggaagcu

SEQ ID NO: 43968 - RNA, 21 nt, Artificial Sequence
  GATA2 Guide RNA
cuuggcuugggaagcugcugc

SEQ ID NO: 43969 - RNA, 21 nt, Artificial Sequence
  GATA2 Guide RNA
cuugggaagcugcugcccuga

SEQ ID NO: 43970 - RNA, 21 nt, Artificial Sequence
  GATA2 Guide RNA
cuuugugcugccaggcaagag

SEQ ID NO: 43971 - RNA, 21 nt, Artificial Sequence
  GATA2 Guide RNA
gaagggcuucccguaagaggg

SEQ ID NO: 43972 - RNA, 21 nt, Artificial Sequence
  GATA2 Guide RNA
gacccuguccuagccagcucc

SEQ ID NO: 43973 - RNA, 21 nt, Artificial Sequence
  GATA2 Guide RNA
gaccucugcgcuuugugcugc

SEQ ID NO: 43974 - RNA, 21 nt, Artificial Sequence
  GATA2 Guide RNA
gagacccuguccuagccagcu

SEQ ID NO: 43975 - RNA, 21 nt, Artificial Sequence
  GATA2 Guide RNA
gagcagaggcaaggcaccccu

SEQ ID NO: 43976 - RNA, 21 nt, Artificial Sequence
  GATA2 Guide RNA
gaggcaaggcaccccucuuac

SEQ ID NO: 43977 - RNA, 21 nt, Artificial Sequence
  GATA2 Guide RNA
gaggccccagccacaauaucc

SEQ ID NO: 43978 - RNA, 21 nt, Artificial Sequence
  GATA2 Guide RNA
gaggggugccuugccucugcu

SEQ ID NO: 43979 - RNA, 21 nt, Artificial Sequence
  GATA2 Guide RNA
gagguggagcuggcuaggaca

SEQ ID NO: 43980 - RNA, 21 nt, Artificial Sequence
  GATA2 Guide RNA
gauauuguggcuggggccucu

SEQ ID NO: 43981 - RNA, 21 nt, Artificial Sequence
  GATA2 Guide RNA
gcaagaggccccagccacaau

SEQ ID NO: 43982 - RNA, 21 nt, Artificial Sequence
  GATA2 Guide RNA
gcaaggcaccccucuuacggg

SEQ ID NO: 43983 - RNA, 21 nt, Artificial Sequence
  GATA2 Guide RNA
gcacaaagcgcagaggucccc

SEQ ID NO: 43984 - RNA, 21 nt, Artificial Sequence
  GATA2 Guide RNA
gcaccccucuuacgggaagcc

SEQ ID NO: 43985 - RNA, 21 nt, Artificial Sequence
  GATA2 Guide RNA
gcagaggcaaggcaccccucu

SEQ ID NO: 43986 - RNA, 21 nt, Artificial Sequence
  GATA2 Guide RNA
gcagagguccccugggagggg

SEQ ID NO: 43987 - RNA, 21 nt, Artificial Sequence
  GATA2 Guide RNA
gcagcacaaagcgcagagguc

SEQ ID NO: 43988 - RNA, 21 nt, Artificial Sequence
  GATA2 Guide RNA
gcagcagcuucccaagccaag

SEQ ID NO: 43989 - RNA, 21 nt, Artificial Sequence
  GATA2 Guide RNA
gcagcuucccaagccaagcca

SEQ ID NO: 43990 - RNA, 21 nt, Artificial Sequence
  GATA2 Guide RNA
gccaagccaagcuggauauug

SEQ ID NO: 43991 - RNA, 21 nt, Artificial Sequence
  GATA2 Guide RNA
gccaagcuggauauuguggcu

SEQ ID NO: 43992 - RNA, 21 nt, Artificial Sequence
  GATA2 Guide RNA
gccacaauauccagcuuggcu

SEQ ID NO: 43993 - RNA, 21 nt, Artificial Sequence
  GATA2 Guide RNA
gccagaagggcuucccguaag

SEQ ID NO: 43994 - RNA, 21 nt, Artificial Sequence
  GATA2 Guide RNA
gccagcuccaccuccugagca

SEQ ID NO: 43995 - RNA, 21 nt, Artificial Sequence
  GATA2 Guide RNA
gccaggcaagaggccccagcc

SEQ ID NO: 43996 - RNA, 21 nt, Artificial Sequence
  GATA2 Guide RNA
gccccagccacaauauccagc

SEQ ID NO: 43997 - RNA, 21 nt, Artificial Sequence
  GATA2 Guide RNA
gccccucccaggggaccucug

SEQ ID NO: 43998 - RNA, 21 nt, Artificial Sequence
  GATA2 Guide RNA
gccucugcucaggagguggag

SEQ ID NO: 43999 - RNA, 21 nt, Artificial Sequence
  GATA2 Guide RNA
gccucuugccuggcagcacaa

SEQ ID NO: 44000 - RNA, 21 nt, Artificial Sequence
  GATA2 Guide RNA
gccuggcagcacaaagcgcag

SEQ ID NO: 44001 - RNA, 21 nt, Artificial Sequence
  GATA2 Guide RNA
gccuugccucugcucaggagg

SEQ ID NO: 44002 - RNA, 21 nt, Artificial Sequence
  GATA2 Guide RNA
gcgcagagguccccugggagg

SEQ ID NO: 44003 - RNA, 21 nt, Artificial Sequence
  GATA2 Guide RNA
gcgcuuugugcugccaggcaa

SEQ ID NO: 44004 - RNA, 21 nt, Artificial Sequence
  GATA2 Guide RNA
gcucaggagguggagcuggcu

SEQ ID NO: 44005 - RNA, 21 nt, Artificial Sequence
  GATA2 Guide RNA
gcuccaccuccugagcagagg

SEQ ID NO: 44006 - RNA, 21 nt, Artificial Sequence
  GATA2 Guide RNA
gcugccaggcaagaggcccca

SEQ ID NO: 44007 - RNA, 21 nt, Artificial Sequence
  GATA2 Guide RNA
gcuggauauuguggcuggggc

SEQ ID NO: 44008 - RNA, 21 nt, Artificial Sequence
  GATA2 Guide RNA
gcuggggccucuugccuggca

SEQ ID NO: 44009 - RNA, 21 nt, Artificial Sequence
  GATA2 Guide RNA
gcuucccaagccaagccaagc

SEQ ID NO: 44010 - RNA, 21 nt, Artificial Sequence
  GATA2 Guide RNA
gcuucccguaagaggggugcc

SEQ ID NO: 44011 - RNA, 21 nt, Artificial Sequence
  GATA2 Guide RNA
gcuuggcuuggcuugggaagc

SEQ ID NO: 44012 - RNA, 21 nt, Artificial Sequence
  GATA2 Guide RNA
gcuuggcuugggaagcugcug

SEQ ID NO: 44013 - RNA, 21 nt, Artificial Sequence
  GATA2 Guide RNA
gcuugggaagcugcugcccug

SEQ ID NO: 44014 - RNA, 21 nt, Artificial Sequence
  GATA2 Guide RNA
gcuuugugcugccaggcaaga

SEQ ID NO: 44015 - RNA, 21 nt, Artificial Sequence
  GATA2 Guide RNA
ggaccucugcgcuuugugcug

SEQ ID NO: 44016 - RNA, 21 nt, Artificial Sequence
  GATA2 Guide RNA
ggagcuggcuaggacaggguc

SEQ ID NO: 44017 - RNA, 21 nt, Artificial Sequence
  GATA2 Guide RNA
ggagguggagcuggcuaggac

SEQ ID NO: 44018 - RNA, 21 nt, Artificial Sequence
  GATA2 Guide RNA
ggauauuguggcuggggccuc

SEQ ID NO: 44019 - RNA, 21 nt, Artificial Sequence
  GATA2 Guide RNA
ggcaagaggccccagccacaa

SEQ ID NO: 44020 - RNA, 21 nt, Artificial Sequence
  GATA2 Guide RNA
ggcaaggcaccccucuuacgg

SEQ ID NO: 44021 - RNA, 21 nt, Artificial Sequence
  GATA2 Guide RNA
ggcaccccucuuacgggaagc

SEQ ID NO: 44022 - RNA, 21 nt, Artificial Sequence
  GATA2 Guide RNA
ggcagcacaaagcgcagaggu

SEQ ID NO: 44023 - RNA, 21 nt, Artificial Sequence
  GATA2 Guide RNA
ggcagcagcuucccaagccaa

SEQ ID NO: 44024 - RNA, 21 nt, Artificial Sequence
  GATA2 Guide RNA
ggccccagccacaauauccag

SEQ ID NO: 44025 - RNA, 21 nt, Artificial Sequence
  GATA2 Guide RNA
ggccucuugccuggcagcaca

SEQ ID NO: 44026 - RNA, 21 nt, Artificial Sequence
  GATA2 Guide RNA
ggcuggggccucuugccuggc

SEQ ID NO: 44027 - RNA, 21 nt, Artificial Sequence
  GATA2 Guide RNA
ggcuucccguaagaggggugc

SEQ ID NO: 44028 - RNA, 21 nt, Artificial Sequence
  GATA2 Guide RNA
ggcuuggcuugggaagcugcu

SEQ ID NO: 44029 - RNA, 21 nt, Artificial Sequence
  GATA2 Guide RNA
ggcuugggaagcugcugcccu

SEQ ID NO: 44030 - RNA, 21 nt, Artificial Sequence
  GATA2 Guide RNA
gggaccucugcgcuuugugcu

SEQ ID NO: 44031 - RNA, 21 nt, Artificial Sequence
  GATA2 Guide RNA
gggcagcagcuucccaagcca

SEQ ID NO: 44032 - RNA, 21 nt, Artificial Sequence
  GATA2 Guide RNA
gggccucuugccuggcagcac

SEQ ID NO: 44033 - RNA, 21 nt, Artificial Sequence
  GATA2 Guide RNA
gggcuucccguaagaggggug

SEQ ID NO: 44034 - RNA, 21 nt, Artificial Sequence
  GATA2 Guide RNA
ggggaccucugcgcuuugugc

SEQ ID NO: 44035 - RNA, 21 nt, Artificial Sequence
  GATA2 Guide RNA
ggggccucuugccuggcagca

SEQ ID NO: 44036 - RNA, 21 nt, Artificial Sequence
  GATA2 Guide RNA
ggggugccuugccucugcuca

SEQ ID NO: 44037 - RNA, 21 nt, Artificial Sequence
  GATA2 Guide RNA
gggugccuugccucugcucag

SEQ ID NO: 44038 - RNA, 21 nt, Artificial Sequence
  GATA2 Guide RNA
ggugccuugccucugcucagg

SEQ ID NO: 44039 - RNA, 21 nt, Artificial Sequence
  GATA2 Guide RNA
gguggagcuggcuaggacagg

SEQ ID NO: 44040 - RNA, 21 nt, Artificial Sequence
  GATA2 Guide RNA
guaagaggggugccuugccuc

SEQ ID NO: 44041 - RNA, 21 nt, Artificial Sequence
  GATA2 Guide RNA
guccuagccagcuccaccucc

SEQ ID NO: 44042 - RNA, 21 nt, Artificial Sequence
  GATA2 Guide RNA
gugccuugccucugcucagga

SEQ ID NO: 44043 - RNA, 21 nt, Artificial Sequence
  GATA2 Guide RNA
gugcugccaggcaagaggccc

SEQ ID NO: 44044 - RNA, 21 nt, Artificial Sequence
  GATA2 Guide RNA
guggagcuggcuaggacaggg

SEQ ID NO: 44045 - RNA, 21 nt, Artificial Sequence
  GATA2 Guide RNA
guggcuggggccucuugccug

SEQ ID NO: 44046 - RNA, 21 nt, Artificial Sequence
  GATA2 Guide RNA
uaagaggggugccuugccucu

SEQ ID NO: 44047 - RNA, 21 nt, Artificial Sequence
  GATA2 Guide RNA
uagccagcuccaccuccugag

SEQ ID NO: 44048 - RNA, 21 nt, Artificial Sequence
  GATA2 Guide RNA
uauccagcuuggcuuggcuug

SEQ ID NO: 44049 - RNA, 21 nt, Artificial Sequence
  GATA2 Guide RNA
uauuguggcuggggccucuug

SEQ ID NO: 44050 - RNA, 21 nt, Artificial Sequence
  GATA2 Guide RNA
ucacucagggcagcagcuucc

SEQ ID NO: 44051 - RNA, 21 nt, Artificial Sequence
  GATA2 Guide RNA
ucaggagguggagcuggcuag

SEQ ID NO: 44052 - RNA, 21 nt, Artificial Sequence
  GATA2 Guide RNA
ucagggcagcagcuucccaag

SEQ ID NO: 44053 - RNA, 21 nt, Artificial Sequence
  GATA2 Guide RNA
uccaccuccugagcagaggca

SEQ ID NO: 44054 - RNA, 21 nt, Artificial Sequence
  GATA2 Guide RNA
uccagcuuggcuuggcuuggg

SEQ ID NO: 44055 - RNA, 21 nt, Artificial Sequence
  GATA2 Guide RNA
ucccaagccaagccaagcugg

SEQ ID NO: 44056 - RNA, 21 nt, Artificial Sequence
  GATA2 Guide RNA
ucccaggggaccucugcgcuu

SEQ ID NO: 44057 - RNA, 21 nt, Artificial Sequence
  GATA2 Guide RNA
ucccguaagaggggugccuug

SEQ ID NO: 44058 - RNA, 21 nt, Artificial Sequence
  GATA2 Guide RNA
uccuagccagcuccaccuccu

SEQ ID NO: 44059 - RNA, 21 nt, Artificial Sequence
  GATA2 Guide RNA
uccugagcagaggcaaggcac

SEQ ID NO: 44060 - RNA, 21 nt, Artificial Sequence
  GATA2 Guide RNA
ucugcgcuuugugcugccagg

SEQ ID NO: 44061 - RNA, 21 nt, Artificial Sequence
  GATA2 Guide RNA
ucugcucaggagguggagcug

SEQ ID NO: 44062 - RNA, 21 nt, Artificial Sequence
  GATA2 Guide RNA
ucuugccuggcagcacaaagc

SEQ ID NO: 44063 - RNA, 21 nt, Artificial Sequence
  GATA2 Guide RNA
ugagcagaggcaaggcacccc

SEQ ID NO: 44064 - RNA, 21 nt, Artificial Sequence
  GATA2 Guide RNA
ugccaggcaagaggccccagc

SEQ ID NO: 44065 - RNA, 21 nt, Artificial Sequence
  GATA2 Guide RNA
ugccucugcucaggaggugga

SEQ ID NO: 44066 - RNA, 21 nt, Artificial Sequence
  GATA2 Guide RNA
ugccuggcagcacaaagcgca

SEQ ID NO: 44067 - RNA, 21 nt, Artificial Sequence
  GATA2 Guide RNA
ugccuugccucugcucaggag

SEQ ID NO: 44068 - RNA, 21 nt, Artificial Sequence
  GATA2 Guide RNA
ugcgcuuugugcugccaggca

SEQ ID NO: 44069 - RNA, 21 nt, Artificial Sequence
  GATA2 Guide RNA
ugcucaggagguggagcuggc

SEQ ID NO: 44070 - RNA, 21 nt, Artificial Sequence
  GATA2 Guide RNA
ugcugccaggcaagaggcccc

SEQ ID NO: 44071 - RNA, 21 nt, Artificial Sequence
  GATA2 Guide RNA
uggagcuggcuaggacagggu

SEQ ID NO: 44072 - RNA, 21 nt, Artificial Sequence
  GATA2 Guide RNA
uggauauuguggcuggggccu

SEQ ID NO: 44073 - RNA, 21 nt, Artificial Sequence
  GATA2 Guide RNA
uggcagcacaaagcgcagagg

SEQ ID NO: 44074 - RNA, 21 nt, Artificial Sequence
  GATA2 Guide RNA
uggcuggggccucuugccugg

SEQ ID NO: 44075 - RNA, 21 nt, Artificial Sequence
  GATA2 Guide RNA
uggcuuggcuugggaagcugc

SEQ ID NO: 44076 - RNA, 21 nt, Artificial Sequence
  GATA2 Guide RNA
uggcuugggaagcugcugccc

SEQ ID NO: 44077 - RNA, 21 nt, Artificial Sequence
  GATA2 Guide RNA
uggggccucuugccuggcagc

SEQ ID NO: 44078 - RNA, 21 nt, Artificial Sequence
  GATA2 Guide RNA
uguccuagccagcuccaccuc

SEQ ID NO: 44079 - RNA, 21 nt, Artificial Sequence
  GATA2 Guide RNA
ugugcugccaggcaagaggcc

SEQ ID NO: 44080 - RNA, 21 nt, Artificial Sequence
  GATA2 Guide RNA
uguggcuggggccucuugccu

SEQ ID NO: 44081 - RNA, 21 nt, Artificial Sequence
  GATA2 Guide RNA
uucccaagccaagccaagcug

SEQ ID NO: 44082 - RNA, 21 nt, Artificial Sequence
  GATA2 Guide RNA
uucccguaagaggggugccuu

SEQ ID NO: 44083 - RNA, 21 nt, Artificial Sequence
  GATA2 Guide RNA
uugccucugcucaggaggugg

SEQ ID NO: 44084 - RNA, 21 nt, Artificial Sequence
  GATA2 Guide RNA
uugccuggcagcacaaagcgc

SEQ ID NO: 44085 - RNA, 21 nt, Artificial Sequence
  GATA2 Guide RNA
uuggcuuggcuugggaagcug

SEQ ID NO: 44086 - RNA, 21 nt, Artificial Sequence
  GATA2 Guide RNA
uuggcuugggaagcugcugcc

SEQ ID NO: 44087 - RNA, 21 nt, Artificial Sequence
  GATA2 Guide RNA
uugggaagcugcugcccugag

SEQ ID NO: 44088 - RNA, 21 nt, Artificial Sequence
  GATA2 Guide RNA
uugugcugccaggcaagaggc

SEQ ID NO: 44089 - RNA, 21 nt, Artificial Sequence
  GATA2 Guide RNA
uuguggcuggggccucuugcc

SEQ ID NO: 44090 - RNA, 21 nt, Artificial Sequence
  GATA2 Guide RNA
uuugugcugccaggcaagagg

SEQ ID NO: 44091 - RNA, 22 nt, Artificial Sequence
  GATA2 Guide RNA
aaagcgcagagguccccuggga

SEQ ID NO: 44092 - RNA, 22 nt, Artificial Sequence
  GATA2 Guide RNA
aagaggccccagccacaauauc

SEQ ID NO: 44093 - RNA, 22 nt, Artificial Sequence
  GATA2 Guide RNA
aagaggggugccuugccucugc

SEQ ID NO: 44094 - RNA, 22 nt, Artificial Sequence
  GATA2 Guide RNA
aagccaagccaagcuggauauu

SEQ ID NO: 44095 - RNA, 22 nt, Artificial Sequence
  GATA2 Guide RNA
aagccaagcuggauauuguggc

SEQ ID NO: 44096 - RNA, 22 nt, Artificial Sequence
  GATA2 Guide RNA
aagcgcagagguccccugggag

SEQ ID NO: 44097 - RNA, 22 nt, Artificial Sequence
  GATA2 Guide RNA
aagcuggauauuguggcugggg

SEQ ID NO: 44098 - RNA, 22 nt, Artificial Sequence
  GATA2 Guide RNA
aaggcaccccucuuacgggaag

SEQ ID NO: 44099 - RNA, 22 nt, Artificial Sequence
  GATA2 Guide RNA
aagggcuucccguaagaggggu

SEQ ID NO: 44100 - RNA, 22 nt, Artificial Sequence
  GATA2 Guide RNA
aauauccagcuuggcuuggcuu

SEQ ID NO: 44101 - RNA, 22 nt, Artificial Sequence
  GATA2 Guide RNA
acaaagcgcagagguccccugg

SEQ ID NO: 44102 - RNA, 22 nt, Artificial Sequence
  GATA2 Guide RNA
acaauauccagcuuggcuuggc

SEQ ID NO: 44103 - RNA, 22 nt, Artificial Sequence
  GATA2 Guide RNA
accccucuuacgggaagcccuu

SEQ ID NO: 44104 - RNA, 22 nt, Artificial Sequence
  GATA2 Guide RNA
acccuguccuagccagcuccac

SEQ ID NO: 44105 - RNA, 22 nt, Artificial Sequence
  GATA2 Guide RNA
accuccugagcagaggcaaggc

SEQ ID NO: 44106 - RNA, 22 nt, Artificial Sequence
  GATA2 Guide RNA
accucugcgcuuugugcugcca

SEQ ID NO: 44107 - RNA, 22 nt, Artificial Sequence
  GATA2 Guide RNA
acucagggcagcagcuucccaa

SEQ ID NO: 44108 - RNA, 22 nt, Artificial Sequence
  GATA2 Guide RNA
agaagggcuucccguaagaggg

SEQ ID NO: 44109 - RNA, 22 nt, Artificial Sequence
  GATA2 Guide RNA
agacccuguccuagccagcucc

SEQ ID NO: 44110 - RNA, 22 nt, Artificial Sequence
  GATA2 Guide RNA
agaggcaaggcaccccucuuac

SEQ ID NO: 44111 - RNA, 22 nt, Artificial Sequence
  GATA2 Guide RNA
agaggccccagccacaauaucc

SEQ ID NO: 44112 - RNA, 22 nt, Artificial Sequence
  GATA2 Guide RNA
agaggggugccuugccucugcu

SEQ ID NO: 44113 - RNA, 22 nt, Artificial Sequence
  GATA2 Guide RNA
agagguccccugggaggggcgg

SEQ ID NO: 44114 - RNA, 22 nt, Artificial Sequence
  GATA2 Guide RNA
agcacaaagcgcagaggucccc

SEQ ID NO: 44115 - RNA, 22 nt, Artificial Sequence
  GATA2 Guide RNA
agcagaggcaaggcaccccucu

SEQ ID NO: 44116 - RNA, 22 nt, Artificial Sequence
  GATA2 Guide RNA
agcagcuucccaagccaagcca

SEQ ID NO: 44117 - RNA, 22 nt, Artificial Sequence
  GATA2 Guide RNA
agccaagccaagcuggauauug

SEQ ID NO: 44118 - RNA, 22 nt, Artificial Sequence
  GATA2 Guide RNA
agccaagcuggauauuguggcu

SEQ ID NO: 44119 - RNA, 22 nt, Artificial Sequence
  GATA2 Guide RNA
agccacaauauccagcuuggcu

SEQ ID NO: 44120 - RNA, 22 nt, Artificial Sequence
  GATA2 Guide RNA
agccagcuccaccuccugagca

SEQ ID NO: 44121 - RNA, 22 nt, Artificial Sequence
  GATA2 Guide RNA
agcgcagagguccccugggagg

SEQ ID NO: 44122 - RNA, 22 nt, Artificial Sequence
  GATA2 Guide RNA
agcuccaccuccugagcagagg

SEQ ID NO: 44123 - RNA, 22 nt, Artificial Sequence
  GATA2 Guide RNA
agcuggauauuguggcuggggc

SEQ ID NO: 44124 - RNA, 22 nt, Artificial Sequence
  GATA2 Guide RNA
agcuucccaagccaagccaagc

SEQ ID NO: 44125 - RNA, 22 nt, Artificial Sequence
  GATA2 Guide RNA
agcuuggcuuggcuugggaagc

SEQ ID NO: 44126 - RNA, 22 nt, Artificial Sequence
  GATA2 Guide RNA
aggagguggagcuggcuaggac

SEQ ID NO: 44127 - RNA, 22 nt, Artificial Sequence
  GATA2 Guide RNA
aggcaagaggccccagccacaa

SEQ ID NO: 44128 - RNA, 22 nt, Artificial Sequence
  GATA2 Guide RNA
aggcaaggcaccccucuuacgg

SEQ ID NO: 44129 - RNA, 22 nt, Artificial Sequence
  GATA2 Guide RNA
aggcaccccucuuacgggaagc

SEQ ID NO: 44130 - RNA, 22 nt, Artificial Sequence
  GATA2 Guide RNA
aggccccagccacaauauccag

SEQ ID NO: 44131 - RNA, 22 nt, Artificial Sequence
  GATA2 Guide RNA
agggcagcagcuucccaagcca

SEQ ID NO: 44132 - RNA, 22 nt, Artificial Sequence
  GATA2 Guide RNA
agggcuucccguaagaggggug

SEQ ID NO: 44133 - RNA, 22 nt, Artificial Sequence
  GATA2 Guide RNA
aggggaccucugcgcuuugugc

SEQ ID NO: 44134 - RNA, 22 nt, Artificial Sequence
  GATA2 Guide RNA
aggggugccuugccucugcuca

SEQ ID NO: 44135 - RNA, 22 nt, Artificial Sequence
  GATA2 Guide RNA
agguggagcuggcuaggacagg

SEQ ID NO: 44136 - RNA, 22 nt, Artificial Sequence
  GATA2 Guide RNA
auauccagcuuggcuuggcuug

SEQ ID NO: 44137 - RNA, 22 nt, Artificial Sequence
  GATA2 Guide RNA
auauuguggcuggggccucuug

SEQ ID NO: 44138 - RNA, 22 nt, Artificial Sequence
  GATA2 Guide RNA
auccagcuuggcuuggcuuggg

SEQ ID NO: 44139 - RNA, 22 nt, Artificial Sequence
  GATA2 Guide RNA
auuguggcuggggccucuugcc

SEQ ID NO: 44140 - RNA, 22 nt, Artificial Sequence
  GATA2 Guide RNA
caaagcgcagagguccccuggg

SEQ ID NO: 44141 - RNA, 22 nt, Artificial Sequence
  GATA2 Guide RNA
caagaggccccagccacaauau

SEQ ID NO: 44142 - RNA, 22 nt, Artificial Sequence
  GATA2 Guide RNA
caagccaagccaagcuggauau

SEQ ID NO: 44143 - RNA, 22 nt, Artificial Sequence
  GATA2 Guide RNA
caagccaagcuggauauugugg

SEQ ID NO: 44144 - RNA, 22 nt, Artificial Sequence
  GATA2 Guide RNA
caagcuggauauuguggcuggg

SEQ ID NO: 44145 - RNA, 22 nt, Artificial Sequence
  GATA2 Guide RNA
caaggcaccccucuuacgggaa

SEQ ID NO: 44146 - RNA, 22 nt, Artificial Sequence
  GATA2 Guide RNA
caauauccagcuuggcuuggcu

SEQ ID NO: 44147 - RNA, 22 nt, Artificial Sequence
  GATA2 Guide RNA
cacaaagcgcagagguccccug

SEQ ID NO: 44148 - RNA, 22 nt, Artificial Sequence
  GATA2 Guide RNA
cacaauauccagcuuggcuugg

SEQ ID NO: 44149 - RNA, 22 nt, Artificial Sequence
  GATA2 Guide RNA
caccccucuuacgggaagcccu

SEQ ID NO: 44150 - RNA, 22 nt, Artificial Sequence
  GATA2 Guide RNA
caccuccugagcagaggcaagg

SEQ ID NO: 44151 - RNA, 22 nt, Artificial Sequence
  GATA2 Guide RNA
cacucagggcagcagcuuccca

SEQ ID NO: 44152 - RNA, 22 nt, Artificial Sequence
  GATA2 Guide RNA
cagaagggcuucccguaagagg

SEQ ID NO: 44153 - RNA, 22 nt, Artificial Sequence
  GATA2 Guide RNA
cagaggcaaggcaccccucuua

SEQ ID NO: 44154 - RNA, 22 nt, Artificial Sequence
  GATA2 Guide RNA
cagagguccccugggaggggcg

SEQ ID NO: 44155 - RNA, 22 nt, Artificial Sequence
  GATA2 Guide RNA
cagcacaaagcgcagagguccc

SEQ ID NO: 44156 - RNA, 22 nt, Artificial Sequence
  GATA2 Guide RNA
cagcagcuucccaagccaagcc

SEQ ID NO: 44157 - RNA, 22 nt, Artificial Sequence
  GATA2 Guide RNA
cagccacaauauccagcuuggc

SEQ ID NO: 44158 - RNA, 22 nt, Artificial Sequence
  GATA2 Guide RNA
cagcuccaccuccugagcagag

SEQ ID NO: 44159 - RNA, 22 nt, Artificial Sequence
  GATA2 Guide RNA
cagcuucccaagccaagccaag

SEQ ID NO: 44160 - RNA, 22 nt, Artificial Sequence
  GATA2 Guide RNA
cagcuuggcuuggcuugggaag

SEQ ID NO: 44161 - RNA, 22 nt, Artificial Sequence
  GATA2 Guide RNA
caggagguggagcuggcuagga

SEQ ID NO: 44162 - RNA, 22 nt, Artificial Sequence
  GATA2 Guide RNA
caggcaagaggccccagccaca

SEQ ID NO: 44163 - RNA, 22 nt, Artificial Sequence
  GATA2 Guide RNA
cagggcagcagcuucccaagcc

SEQ ID NO: 44164 - RNA, 22 nt, Artificial Sequence
  GATA2 Guide RNA
caggggaccucugcgcuuugug

SEQ ID NO: 44165 - RNA, 22 nt, Artificial Sequence
  GATA2 Guide RNA
ccaagccaagccaagcuggaua

SEQ ID NO: 44166 - RNA, 22 nt, Artificial Sequence
  GATA2 Guide RNA
ccaagccaagcuggauauugug

SEQ ID NO: 44167 - RNA, 22 nt, Artificial Sequence
  GATA2 Guide RNA
ccaagcuggauauuguggcugg

SEQ ID NO: 44168 - RNA, 22 nt, Artificial Sequence
  GATA2 Guide RNA
ccacaauauccagcuuggcuug

SEQ ID NO: 44169 - RNA, 22 nt, Artificial Sequence
  GATA2 Guide RNA
ccaccuccugagcagaggcaag

SEQ ID NO: 44170 - RNA, 22 nt, Artificial Sequence
  GATA2 Guide RNA
ccagaagggcuucccguaagag

SEQ ID NO: 44171 - RNA, 22 nt, Artificial Sequence
  GATA2 Guide RNA
ccagccacaauauccagcuugg

SEQ ID NO: 44172 - RNA, 22 nt, Artificial Sequence
  GATA2 Guide RNA
ccagcuccaccuccugagcaga

SEQ ID NO: 44173 - RNA, 22 nt, Artificial Sequence
  GATA2 Guide RNA
ccagcuuggcuuggcuugggaa

SEQ ID NO: 44174 - RNA, 22 nt, Artificial Sequence
  GATA2 Guide RNA
ccaggcaagaggccccagccac

SEQ ID NO: 44175 - RNA, 22 nt, Artificial Sequence
  GATA2 Guide RNA
ccaggggaccucugcgcuuugu

SEQ ID NO: 44176 - RNA, 22 nt, Artificial Sequence
  GATA2 Guide RNA
cccaagccaagccaagcuggau

SEQ ID NO: 44177 - RNA, 22 nt, Artificial Sequence
  GATA2 Guide RNA
cccagccacaauauccagcuug

SEQ ID NO: 44178 - RNA, 22 nt, Artificial Sequence
  GATA2 Guide RNA
cccaggggaccucugcgcuuug

SEQ ID NO: 44179 - RNA, 22 nt, Artificial Sequence
  GATA2 Guide RNA
ccccagccacaauauccagcuu

SEQ ID NO: 44180 - RNA, 22 nt, Artificial Sequence
  GATA2 Guide RNA
ccccucccaggggaccucugcg

SEQ ID NO: 44181 - RNA, 22 nt, Artificial Sequence
  GATA2 Guide RNA
ccccucuuacgggaagcccuuc

SEQ ID NO: 44182 - RNA, 22 nt, Artificial Sequence
  GATA2 Guide RNA
cccguaagaggggugccuugcc

SEQ ID NO: 44183 - RNA, 22 nt, Artificial Sequence
  GATA2 Guide RNA
cccucccaggggaccucugcgc

SEQ ID NO: 44184 - RNA, 22 nt, Artificial Sequence
  GATA2 Guide RNA
cccucuuacgggaagcccuucu

SEQ ID NO: 44185 - RNA, 22 nt, Artificial Sequence
  GATA2 Guide RNA
cccuguccuagccagcuccacc

SEQ ID NO: 44186 - RNA, 22 nt, Artificial Sequence
  GATA2 Guide RNA
ccgagacccuguccuagccagc

SEQ ID NO: 44187 - RNA, 22 nt, Artificial Sequence
  GATA2 Guide RNA
ccgccccucccaggggaccucu

SEQ ID NO: 44188 - RNA, 22 nt, Artificial Sequence
  GATA2 Guide RNA
ccguaagaggggugccuugccu

SEQ ID NO: 44189 - RNA, 22 nt, Artificial Sequence
  GATA2 Guide RNA
ccuagccagcuccaccuccuga

SEQ ID NO: 44190 - RNA, 22 nt, Artificial Sequence
  GATA2 Guide RNA
ccucccaggggaccucugcgcu

SEQ ID NO: 44191 - RNA, 22 nt, Artificial Sequence
  GATA2 Guide RNA
ccuccugagcagaggcaaggca

SEQ ID NO: 44192 - RNA, 22 nt, Artificial Sequence
  GATA2 Guide RNA
ccucugcgcuuugugcugccag

SEQ ID NO: 44193 - RNA, 22 nt, Artificial Sequence
  GATA2 Guide RNA
ccucugcucaggagguggagcu

SEQ ID NO: 44194 - RNA, 22 nt, Artificial Sequence
  GATA2 Guide RNA
ccucuugccuggcagcacaaag

SEQ ID NO: 44195 - RNA, 22 nt, Artificial Sequence
  GATA2 Guide RNA
ccugagcagaggcaaggcaccc

SEQ ID NO: 44196 - RNA, 22 nt, Artificial Sequence
  GATA2 Guide RNA
ccuggcagcacaaagcgcagag

SEQ ID NO: 44197 - RNA, 22 nt, Artificial Sequence
  GATA2 Guide RNA
ccuguccuagccagcuccaccu

SEQ ID NO: 44198 - RNA, 22 nt, Artificial Sequence
  GATA2 Guide RNA
ccuugccucugcucaggaggug

SEQ ID NO: 44199 - RNA, 22 nt, Artificial Sequence
  GATA2 Guide RNA
cgagacccuguccuagccagcu

SEQ ID NO: 44200 - RNA, 22 nt, Artificial Sequence
  GATA2 Guide RNA
cgcagagguccccugggagggg

SEQ ID NO: 44201 - RNA, 22 nt, Artificial Sequence
  GATA2 Guide RNA
cgccagaagggcuucccguaag

SEQ ID NO: 44202 - RNA, 22 nt, Artificial Sequence
  GATA2 Guide RNA
cgccccucccaggggaccucug

SEQ ID NO: 44203 - RNA, 22 nt, Artificial Sequence
  GATA2 Guide RNA
cgcuuugugcugccaggcaaga

SEQ ID NO: 44204 - RNA, 22 nt, Artificial Sequence
  GATA2 Guide RNA
cguaagaggggugccuugccuc

SEQ ID NO: 44205 - RNA, 22 nt, Artificial Sequence
  GATA2 Guide RNA
cuagccagcuccaccuccugag

SEQ ID NO: 44206 - RNA, 22 nt, Artificial Sequence
  GATA2 Guide RNA
cucacucagggcagcagcuucc

SEQ ID NO: 44207 - RNA, 22 nt, Artificial Sequence
  GATA2 Guide RNA
cucaggagguggagcuggcuag

SEQ ID NO: 44208 - RNA, 22 nt, Artificial Sequence
  GATA2 Guide RNA
cucagggcagcagcuucccaag

SEQ ID NO: 44209 - RNA, 22 nt, Artificial Sequence
  GATA2 Guide RNA
cuccaccuccugagcagaggca

SEQ ID NO: 44210 - RNA, 22 nt, Artificial Sequence
  GATA2 Guide RNA
cucccaggggaccucugcgcuu

SEQ ID NO: 44211 - RNA, 22 nt, Artificial Sequence
  GATA2 Guide RNA
cuccugagcagaggcaaggcac

SEQ ID NO: 44212 - RNA, 22 nt, Artificial Sequence
  GATA2 Guide RNA
cucugcgcuuugugcugccagg

SEQ ID NO: 44213 - RNA, 22 nt, Artificial Sequence
  GATA2 Guide RNA
cucugcucaggagguggagcug

SEQ ID NO: 44214 - RNA, 22 nt, Artificial Sequence
  GATA2 Guide RNA
cucuugccuggcagcacaaagc

SEQ ID NO: 44215 - RNA, 22 nt, Artificial Sequence
  GATA2 Guide RNA
cugagcagaggcaaggcacccc

SEQ ID NO: 44216 - RNA, 22 nt, Artificial Sequence
  GATA2 Guide RNA
cugccaggcaagaggccccagc

SEQ ID NO: 44217 - RNA, 22 nt, Artificial Sequence
  GATA2 Guide RNA
cugcgcuuugugcugccaggca

SEQ ID NO: 44218 - RNA, 22 nt, Artificial Sequence
  GATA2 Guide RNA
cugcucaggagguggagcuggc

SEQ ID NO: 44219 - RNA, 22 nt, Artificial Sequence
  GATA2 Guide RNA
cuggauauuguggcuggggccu

SEQ ID NO: 44220 - RNA, 22 nt, Artificial Sequence
  GATA2 Guide RNA
cuggcagcacaaagcgcagagg

SEQ ID NO: 44221 - RNA, 22 nt, Artificial Sequence
  GATA2 Guide RNA
cuggggccucuugccuggcagc

SEQ ID NO: 44222 - RNA, 22 nt, Artificial Sequence
  GATA2 Guide RNA
cuguccuagccagcuccaccuc

SEQ ID NO: 44223 - RNA, 22 nt, Artificial Sequence
  GATA2 Guide RNA
cuucccaagccaagccaagcug

SEQ ID NO: 44224 - RNA, 22 nt, Artificial Sequence
  GATA2 Guide RNA
cuucccguaagaggggugccuu

SEQ ID NO: 44225 - RNA, 22 nt, Artificial Sequence
  GATA2 Guide RNA
cuugccucugcucaggaggugg

SEQ ID NO: 44226 - RNA, 22 nt, Artificial Sequence
  GATA2 Guide RNA
cuugccuggcagcacaaagcgc

SEQ ID NO: 44227 - RNA, 22 nt, Artificial Sequence
  GATA2 Guide RNA
cuuggcuuggcuugggaagcug

SEQ ID NO: 44228 - RNA, 22 nt, Artificial Sequence
  GATA2 Guide RNA
cuuggcuugggaagcugcugcc

SEQ ID NO: 44229 - RNA, 22 nt, Artificial Sequence
  GATA2 Guide RNA
cuugggaagcugcugcccugag

SEQ ID NO: 44230 - RNA, 22 nt, Artificial Sequence
  GATA2 Guide RNA
cuuugugcugccaggcaagagg

SEQ ID NO: 44231 - RNA, 22 nt, Artificial Sequence
  GATA2 Guide RNA
gaagggcuucccguaagagggg

SEQ ID NO: 44232 - RNA, 22 nt, Artificial Sequence
  GATA2 Guide RNA
gacccuguccuagccagcucca

SEQ ID NO: 44233 - RNA, 22 nt, Artificial Sequence
  GATA2 Guide RNA
gaccucugcgcuuugugcugcc

SEQ ID NO: 44234 - RNA, 22 nt, Artificial Sequence
  GATA2 Guide RNA
gagacccuguccuagccagcuc

SEQ ID NO: 44235 - RNA, 22 nt, Artificial Sequence
  GATA2 Guide RNA
gagcagaggcaaggcaccccuc

SEQ ID NO: 44236 - RNA, 22 nt, Artificial Sequence
  GATA2 Guide RNA
gaggcaaggcaccccucuuacg

SEQ ID NO: 44237 - RNA, 22 nt, Artificial Sequence
  GATA2 Guide RNA
gaggccccagccacaauaucca

SEQ ID NO: 44238 - RNA, 22 nt, Artificial Sequence
  GATA2 Guide RNA
gaggggugccuugccucugcuc

SEQ ID NO: 44239 - RNA, 22 nt, Artificial Sequence
  GATA2 Guide RNA
gagguggagcuggcuaggacag

SEQ ID NO: 44240 - RNA, 22 nt, Artificial Sequence
  GATA2 Guide RNA
gauauuguggcuggggccucuu

SEQ ID NO: 44241 - RNA, 22 nt, Artificial Sequence
  GATA2 Guide RNA
gcaagaggccccagccacaaua

SEQ ID NO: 44242 - RNA, 22 nt, Artificial Sequence
  GATA2 Guide RNA
gcaaggcaccccucuuacggga

SEQ ID NO: 44243 - RNA, 22 nt, Artificial Sequence
  GATA2 Guide RNA
gcacaaagcgcagagguccccu

SEQ ID NO: 44244 - RNA, 22 nt, Artificial Sequence
  GATA2 Guide RNA
gcaccccucuuacgggaagccc

SEQ ID NO: 44245 - RNA, 22 nt, Artificial Sequence
  GATA2 Guide RNA
gcagaggcaaggcaccccucuu

SEQ ID NO: 44246 - RNA, 22 nt, Artificial Sequence
  GATA2 Guide RNA
gcagagguccccugggaggggc

SEQ ID NO: 44247 - RNA, 22 nt, Artificial Sequence
  GATA2 Guide RNA
gcagcacaaagcgcagaggucc

SEQ ID NO: 44248 - RNA, 22 nt, Artificial Sequence
  GATA2 Guide RNA
gcagcagcuucccaagccaagc

SEQ ID NO: 44249 - RNA, 22 nt, Artificial Sequence
  GATA2 Guide RNA
gcagcuucccaagccaagccaa

SEQ ID NO: 44250 - RNA, 22 nt, Artificial Sequence
  GATA2 Guide RNA
gccaagccaagcuggauauugu

SEQ ID NO: 44251 - RNA, 22 nt, Artificial Sequence
  GATA2 Guide RNA
gccaagcuggauauuguggcug

SEQ ID NO: 44252 - RNA, 22 nt, Artificial Sequence
  GATA2 Guide RNA
gccacaauauccagcuuggcuu

SEQ ID NO: 44253 - RNA, 22 nt, Artificial Sequence
  GATA2 Guide RNA
gccagaagggcuucccguaaga

SEQ ID NO: 44254 - RNA, 22 nt, Artificial Sequence
  GATA2 Guide RNA
gccagcuccaccuccugagcag

SEQ ID NO: 44255 - RNA, 22 nt, Artificial Sequence
  GATA2 Guide RNA
gccaggcaagaggccccagcca

SEQ ID NO: 44256 - RNA, 22 nt, Artificial Sequence
  GATA2 Guide RNA
gccccagccacaauauccagcu

SEQ ID NO: 44257 - RNA, 22 nt, Artificial Sequence
  GATA2 Guide RNA
gccccucccaggggaccucugc

SEQ ID NO: 44258 - RNA, 22 nt, Artificial Sequence
  GATA2 Guide RNA
gccucugcucaggagguggagc

SEQ ID NO: 44259 - RNA, 22 nt, Artificial Sequence
  GATA2 Guide RNA
gccucuugccuggcagcacaaa

SEQ ID NO: 44260 - RNA, 22 nt, Artificial Sequence
  GATA2 Guide RNA
gccuggcagcacaaagcgcaga

SEQ ID NO: 44261 - RNA, 22 nt, Artificial Sequence
  GATA2 Guide RNA
gccuugccucugcucaggaggu

SEQ ID NO: 44262 - RNA, 22 nt, Artificial Sequence
  GATA2 Guide RNA
gcgcagagguccccugggaggg

SEQ ID NO: 44263 - RNA, 22 nt, Artificial Sequence
  GATA2 Guide RNA
gcgcuuugugcugccaggcaag

SEQ ID NO: 44264 - RNA, 22 nt, Artificial Sequence
  GATA2 Guide RNA
gcucaggagguggagcuggcua

SEQ ID NO: 44265 - RNA, 22 nt, Artificial Sequence
  GATA2 Guide RNA
gcuccaccuccugagcagaggc

SEQ ID NO: 44266 - RNA, 22 nt, Artificial Sequence
  GATA2 Guide RNA
gcugccaggcaagaggccccag

SEQ ID NO: 44267 - RNA, 22 nt, Artificial Sequence
  GATA2 Guide RNA
gcuggauauuguggcuggggcc

SEQ ID NO: 44268 - RNA, 22 nt, Artificial Sequence
  GATA2 Guide RNA
gcuggggccucuugccuggcag

SEQ ID NO: 44269 - RNA, 22 nt, Artificial Sequence
  GATA2 Guide RNA
gcuucccaagccaagccaagcu

SEQ ID NO: 44270 - RNA, 22 nt, Artificial Sequence
  GATA2 Guide RNA
gcuucccguaagaggggugccu

SEQ ID NO: 44271 - RNA, 22 nt, Artificial Sequence
  GATA2 Guide RNA
gcuuggcuuggcuugggaagcu

SEQ ID NO: 44272 - RNA, 22 nt, Artificial Sequence
  GATA2 Guide RNA
gcuuggcuugggaagcugcugc

SEQ ID NO: 44273 - RNA, 22 nt, Artificial Sequence
  GATA2 Guide RNA
gcuugggaagcugcugcccuga

SEQ ID NO: 44274 - RNA, 22 nt, Artificial Sequence
  GATA2 Guide RNA
gcuuugugcugccaggcaagag

SEQ ID NO: 44275 - RNA, 22 nt, Artificial Sequence
  GATA2 Guide RNA
ggaccucugcgcuuugugcugc

SEQ ID NO: 44276 - RNA, 22 nt, Artificial Sequence
  GATA2 Guide RNA
ggagguggagcuggcuaggaca

SEQ ID NO: 44277 - RNA, 22 nt, Artificial Sequence
  GATA2 Guide RNA
ggauauuguggcuggggccucu

SEQ ID NO: 44278 - RNA, 22 nt, Artificial Sequence
  GATA2 Guide RNA
ggcaagaggccccagccacaau

SEQ ID NO: 44279 - RNA, 22 nt, Artificial Sequence
  GATA2 Guide RNA
ggcaaggcaccccucuuacggg

SEQ ID NO: 44280 - RNA, 22 nt, Artificial Sequence
  GATA2 Guide RNA
ggcaccccucuuacgggaagcc

SEQ ID NO: 44281 - RNA, 22 nt, Artificial Sequence
  GATA2 Guide RNA
ggcagcacaaagcgcagagguc

SEQ ID NO: 44282 - RNA, 22 nt, Artificial Sequence
  GATA2 Guide RNA
ggcagcagcuucccaagccaag

SEQ ID NO: 44283 - RNA, 22 nt, Artificial Sequence
  GATA2 Guide RNA
ggccccagccacaauauccagc

SEQ ID NO: 44284 - RNA, 22 nt, Artificial Sequence
  GATA2 Guide RNA
ggccucuugccuggcagcacaa

SEQ ID NO: 44285 - RNA, 22 nt, Artificial Sequence
  GATA2 Guide RNA
ggcuggggccucuugccuggca

SEQ ID NO: 44286 - RNA, 22 nt, Artificial Sequence
  GATA2 Guide RNA
ggcuucccguaagaggggugcc

SEQ ID NO: 44287 - RNA, 22 nt, Artificial Sequence
  GATA2 Guide RNA
ggcuuggcuugggaagcugcug

SEQ ID NO: 44288 - RNA, 22 nt, Artificial Sequence
  GATA2 Guide RNA
ggcuugggaagcugcugcccug

SEQ ID NO: 44289 - RNA, 22 nt, Artificial Sequence
  GATA2 Guide RNA
gggaccucugcgcuuugugcug

SEQ ID NO: 44290 - RNA, 22 nt, Artificial Sequence
  GATA2 Guide RNA
gggcagcagcuucccaagccaa

SEQ ID NO: 44291 - RNA, 22 nt, Artificial Sequence
  GATA2 Guide RNA
gggccucuugccuggcagcaca

SEQ ID NO: 44292 - RNA, 22 nt, Artificial Sequence
  GATA2 Guide RNA
gggcuucccguaagaggggugc

SEQ ID NO: 44293 - RNA, 22 nt, Artificial Sequence
  GATA2 Guide RNA
ggggaccucugcgcuuugugcu

SEQ ID NO: 44294 - RNA, 22 nt, Artificial Sequence
  GATA2 Guide RNA
ggggccucuugccuggcagcac

SEQ ID NO: 44295 - RNA, 22 nt, Artificial Sequence
  GATA2 Guide RNA
ggggugccuugccucugcucag

SEQ ID NO: 44296 - RNA, 22 nt, Artificial Sequence
  GATA2 Guide RNA
gggugccuugccucugcucagg

SEQ ID NO: 44297 - RNA, 22 nt, Artificial Sequence
  GATA2 Guide RNA
ggugccuugccucugcucagga

SEQ ID NO: 44298 - RNA, 22 nt, Artificial Sequence
  GATA2 Guide RNA
gguggagcuggcuaggacaggg

SEQ ID NO: 44299 - RNA, 22 nt, Artificial Sequence
  GATA2 Guide RNA
guaagaggggugccuugccucu

SEQ ID NO: 44300 - RNA, 22 nt, Artificial Sequence
  GATA2 Guide RNA
guccuagccagcuccaccuccu

SEQ ID NO: 44301 - RNA, 22 nt, Artificial Sequence
  GATA2 Guide RNA
gugccuugccucugcucaggag

SEQ ID NO: 44302 - RNA, 22 nt, Artificial Sequence
  GATA2 Guide RNA
gugcugccaggcaagaggcccc

SEQ ID NO: 44303 - RNA, 22 nt, Artificial Sequence
  GATA2 Guide RNA
guggagcuggcuaggacagggu

SEQ ID NO: 44304 - RNA, 22 nt, Artificial Sequence
  GATA2 Guide RNA
guggcuggggccucuugccugg

SEQ ID NO: 44305 - RNA, 22 nt, Artificial Sequence
  GATA2 Guide RNA
uaagaggggugccuugccucug

SEQ ID NO: 44306 - RNA, 22 nt, Artificial Sequence
  GATA2 Guide RNA
uagccagcuccaccuccugagc

SEQ ID NO: 44307 - RNA, 22 nt, Artificial Sequence
  GATA2 Guide RNA
uauccagcuuggcuuggcuugg

SEQ ID NO: 44308 - RNA, 22 nt, Artificial Sequence
  GATA2 Guide RNA
uauuguggcuggggccucuugc

SEQ ID NO: 44309 - RNA, 22 nt, Artificial Sequence
  GATA2 Guide RNA
ucacucagggcagcagcuuccc

SEQ ID NO: 44310 - RNA, 22 nt, Artificial Sequence
  GATA2 Guide RNA
ucaggagguggagcuggcuagg

SEQ ID NO: 44311 - RNA, 22 nt, Artificial Sequence
  GATA2 Guide RNA
ucagggcagcagcuucccaagc

SEQ ID NO: 44312 - RNA, 22 nt, Artificial Sequence
  GATA2 Guide RNA
uccaccuccugagcagaggcaa

SEQ ID NO: 44313 - RNA, 22 nt, Artificial Sequence
  GATA2 Guide RNA
uccagcuuggcuuggcuuggga

SEQ ID NO: 44314 - RNA, 22 nt, Artificial Sequence
  GATA2 Guide RNA
ucccaagccaagccaagcugga

SEQ ID NO: 44315 - RNA, 22 nt, Artificial Sequence
  GATA2 Guide RNA
ucccaggggaccucugcgcuuu

SEQ ID NO: 44316 - RNA, 22 nt, Artificial Sequence
  GATA2 Guide RNA
ucccguaagaggggugccuugc

SEQ ID NO: 44317 - RNA, 22 nt, Artificial Sequence
  GATA2 Guide RNA
uccuagccagcuccaccuccug

SEQ ID NO: 44318 - RNA, 22 nt, Artificial Sequence
  GATA2 Guide RNA
uccugagcagaggcaaggcacc

SEQ ID NO: 44319 - RNA, 22 nt, Artificial Sequence
  GATA2 Guide RNA
ucugcgcuuugugcugccaggc

SEQ ID NO: 44320 - RNA, 22 nt, Artificial Sequence
  GATA2 Guide RNA
ucugcucaggagguggagcugg

SEQ ID NO: 44321 - RNA, 22 nt, Artificial Sequence
  GATA2 Guide RNA
ucuugccuggcagcacaaagcg

SEQ ID NO: 44322 - RNA, 22 nt, Artificial Sequence
  GATA2 Guide RNA
ugagcagaggcaaggcaccccu

SEQ ID NO: 44323 - RNA, 22 nt, Artificial Sequence
  GATA2 Guide RNA
ugccaggcaagaggccccagcc

SEQ ID NO: 44324 - RNA, 22 nt, Artificial Sequence
  GATA2 Guide RNA
ugccucugcucaggagguggag

SEQ ID NO: 44325 - RNA, 22 nt, Artificial Sequence
  GATA2 Guide RNA
ugccuggcagcacaaagcgcag

SEQ ID NO: 44326 - RNA, 22 nt, Artificial Sequence
  GATA2 Guide RNA
ugccuugccucugcucaggagg

SEQ ID NO: 44327 - RNA, 22 nt, Artificial Sequence
  GATA2 Guide RNA
ugcgcuuugugcugccaggcaa

SEQ ID NO: 44328 - RNA, 22 nt, Artificial Sequence
  GATA2 Guide RNA
ugcucaggagguggagcuggcu

SEQ ID NO: 44329 - RNA, 22 nt, Artificial Sequence
  GATA2 Guide RNA
ugcugccaggcaagaggcccca

SEQ ID NO: 44330 - RNA, 22 nt, Artificial Sequence
  GATA2 Guide RNA
uggagcuggcuaggacaggguc

SEQ ID NO: 44331 - RNA, 22 nt, Artificial Sequence
  GATA2 Guide RNA
uggauauuguggcuggggccuc

SEQ ID NO: 44332 - RNA, 22 nt, Artificial Sequence
  GATA2 Guide RNA
uggcagcacaaagcgcagaggu

SEQ ID NO: 44333 - RNA, 22 nt, Artificial Sequence
  GATA2 Guide RNA
uggcuggggccucuugccuggc

SEQ ID NO: 44334 - RNA, 22 nt, Artificial Sequence
  GATA2 Guide RNA
uggcuuggcuugggaagcugcu

SEQ ID NO: 44335 - RNA, 22 nt, Artificial Sequence
  GATA2 Guide RNA
uggcuugggaagcugcugcccu

SEQ ID NO: 44336 - RNA, 22 nt, Artificial Sequence
  GATA2 Guide RNA
uggggccucuugccuggcagca

SEQ ID NO: 44337 - RNA, 22 nt, Artificial Sequence
  GATA2 Guide RNA
uguccuagccagcuccaccucc

SEQ ID NO: 44338 - RNA, 22 nt, Artificial Sequence
  GATA2 Guide RNA
ugugcugccaggcaagaggccc

SEQ ID NO: 44339 - RNA, 22 nt, Artificial Sequence
  GATA2 Guide RNA
uguggcuggggccucuugccug

SEQ ID NO: 44340 - RNA, 22 nt, Artificial Sequence
  GATA2 Guide RNA
uucccaagccaagccaagcugg

SEQ ID NO: 44341 - RNA, 22 nt, Artificial Sequence
  GATA2 Guide RNA
uucccguaagaggggugccuug

SEQ ID NO: 44342 - RNA, 22 nt, Artificial Sequence
  GATA2 Guide RNA
uugccucugcucaggaggugga

SEQ ID NO: 44343 - RNA, 22 nt, Artificial Sequence
  GATA2 Guide RNA
uugccuggcagcacaaagcgca

SEQ ID NO: 44344 - RNA, 22 nt, Artificial Sequence
  GATA2 Guide RNA
uuggcuuggcuugggaagcugc

SEQ ID NO: 44345 - RNA, 22 nt, Artificial Sequence
  GATA2 Guide RNA
uuggcuugggaagcugcugccc

SEQ ID NO: 44346 - RNA, 22 nt, Artificial Sequence
  GATA2 Guide RNA
uugugcugccaggcaagaggcc

SEQ ID NO: 44347 - RNA, 22 nt, Artificial Sequence
  GATA2 Guide RNA
uuguggcuggggccucuugccu

SEQ ID NO: 44348 - RNA, 22 nt, Artificial Sequence
  GATA2 Guide RNA
uuugugcugccaggcaagaggc

SEQ ID NO: 44349 - RNA, 20 nt, Artificial Sequence
  17 nucleotide guide sequence
aaacugacaccucagggaca

SEQ ID NO: 44350 - RNA, 17 nt, Artificial Sequence
  17 nucleotide guide sequence 1
cugacaccucagggaca

SEQ ID NO: 44351 - RNA, 17 nt, Artificial Sequence
  17 nucleotide guide sequence 2
acugacaccucagggac

SEQ ID NO: 44352 - RNA, 17 nt, Artificial Sequence
  17 nucleotide guide sequence 3
aacugacaccucaggga

SEQ ID NO: 44353 - RNA, 17 nt, Artificial Sequence
  17 nucleotide guide sequence 4
aaacugacaccucaggg
